United States Patent Application Publication US 2014/0004565 A1 - sequence listing, part 131

SEQ ID NO: 3290200 - RNA, 19 nt, Artificial Sequence
  Description of Artificial Sequence: Synthetic oligonucleotide
aucucaggagcugggaacu

SEQ ID NO: 3290201 - RNA, 19 nt, Artificial Sequence
  Description of Artificial Sequence: Synthetic oligonucleotide
cucaggagcugggaacuug

SEQ ID NO: 3290202 - RNA, 19 nt, Artificial Sequence
  Description of Artificial Sequence: Synthetic oligonucleotide
ucaggagcugggaacuugc

SEQ ID NO: 3290203 - RNA, 19 nt, Artificial Sequence
  Description of Artificial Sequence: Synthetic oligonucleotide
caggagcugggaacuugcc

SEQ ID NO: 3290204 - RNA, 19 nt, Artificial Sequence
  Description of Artificial Sequence: Synthetic oligonucleotide
aggagcugggaacuugccu

SEQ ID NO: 3290205 - RNA, 19 nt, Artificial Sequence
  Description of Artificial Sequence: Synthetic oligonucleotide
agcugggaacuugccugag

SEQ ID NO: 3290206 - RNA, 19 nt, Artificial Sequence
  Description of Artificial Sequence: Synthetic oligonucleotide
cugggaacuugccugaguu

SEQ ID NO: 3290207 - RNA, 19 nt, Artificial Sequence
  Description of Artificial Sequence: Synthetic oligonucleotide
ugggaacuugccugaguug

SEQ ID NO: 3290208 - RNA, 19 nt, Artificial Sequence
  Description of Artificial Sequence: Synthetic oligonucleotide
aacuugccugaguuggaca

SEQ ID NO: 3290209 - RNA, 19 nt, Artificial Sequence
  Description of Artificial Sequence: Synthetic oligonucleotide
cuugccugaguuggacacc

SEQ ID NO: 3290210 - RNA, 19 nt, Artificial Sequence
  Description of Artificial Sequence: Synthetic oligonucleotide
ugccugaguuggacaccuu

SEQ ID NO: 3290211 - RNA, 19 nt, Artificial Sequence
  Description of Artificial Sequence: Synthetic oligonucleotide
gccugaguuggacaccuuu

SEQ ID NO: 3290212 - RNA, 19 nt, Artificial Sequence
  Description of Artificial Sequence: Synthetic oligonucleotide
cugaguuggacaccuuucc

SEQ ID NO: 3290213 - RNA, 19 nt, Artificial Sequence
  Description of Artificial Sequence: Synthetic oligonucleotide
acaccaaugggagauacag

SEQ ID NO: 3290214 - RNA, 19 nt, Artificial Sequence
  Description of Artificial Sequence: Synthetic oligonucleotide
ccaaugggagauacaguac

SEQ ID NO: 3290215 - RNA, 19 nt, Artificial Sequence
  Description of Artificial Sequence: Synthetic oligonucleotide
augggagauacaguaccuc

SEQ ID NO: 3290216 - RNA, 19 nt, Artificial Sequence
  Description of Artificial Sequence: Synthetic oligonucleotide
ugggagauacaguaccucg

SEQ ID NO: 3290217 - RNA, 19 nt, Artificial Sequence
  Description of Artificial Sequence: Synthetic oligonucleotide
gggagauacaguaccucgg

SEQ ID NO: 3290218 - RNA, 19 nt, Artificial Sequence
  Description of Artificial Sequence: Synthetic oligonucleotide
ggagauacaguaccucgga

SEQ ID NO: 3290219 - RNA, 19 nt, Artificial Sequence
  Description of Artificial Sequence: Synthetic oligonucleotide
gagauacaguaccucggau

SEQ ID NO: 3290220 - RNA, 19 nt, Artificial Sequence
  Description of Artificial Sequence: Synthetic oligonucleotide
agauacaguaccucggaua

SEQ ID NO: 3290221 - RNA, 19 nt, Artificial Sequence
  Description of Artificial Sequence: Synthetic oligonucleotide
gauacaguaccucggauac

SEQ ID NO: 3290222 - RNA, 19 nt, Artificial Sequence
  Description of Artificial Sequence: Synthetic oligonucleotide
auacaguaccucggauacc

SEQ ID NO: 3290223 - RNA, 19 nt, Artificial Sequence
  Description of Artificial Sequence: Synthetic oligonucleotide
uacaguaccucggauaccc

SEQ ID NO: 3290224 - RNA, 19 nt, Artificial Sequence
  Description of Artificial Sequence: Synthetic oligonucleotide
auacccaggaagacacauu

SEQ ID NO: 3290225 - RNA, 19 nt, Artificial Sequence
  Description of Artificial Sequence: Synthetic oligonucleotide
cccaggaagacacauuaga

SEQ ID NO: 3290226 - RNA, 19 nt, Artificial Sequence
  Description of Artificial Sequence: Synthetic oligonucleotide
caggaagacacauuagagg

SEQ ID NO: 3290227 - RNA, 19 nt, Artificial Sequence
  Description of Artificial Sequence: Synthetic oligonucleotide
gacacauuagaggaguuac

SEQ ID NO: 3290228 - RNA, 19 nt, Artificial Sequence
  Description of Artificial Sequence: Synthetic oligonucleotide
acacauuagaggaguuacu

SEQ ID NO: 3290229 - RNA, 19 nt, Artificial Sequence
  Description of Artificial Sequence: Synthetic oligonucleotide
cacauuagaggaguuacug

SEQ ID NO: 3290230 - RNA, 19 nt, Artificial Sequence
  Description of Artificial Sequence: Synthetic oligonucleotide
cauuagaggaguuacuggg

SEQ ID NO: 3290231 - RNA, 19 nt, Artificial Sequence
  Description of Artificial Sequence: Synthetic oligonucleotide
guuacugggugacaugguc

SEQ ID NO: 3290232 - RNA, 19 nt, Artificial Sequence
  Description of Artificial Sequence: Synthetic oligonucleotide
uuacugggugacauggucu

SEQ ID NO: 3290233 - RNA, 19 nt, Artificial Sequence
  Description of Artificial Sequence: Synthetic oligonucleotide
uacugggugacauggucuu

SEQ ID NO: 3290234 - RNA, 19 nt, Artificial Sequence
  Description of Artificial Sequence: Synthetic oligonucleotide
acugggugacauggucuug

SEQ ID NO: 3290235 - RNA, 19 nt, Artificial Sequence
  Description of Artificial Sequence: Synthetic oligonucleotide
cugggugacauggucuuga

SEQ ID NO: 3290236 - RNA, 19 nt, Artificial Sequence
  Description of Artificial Sequence: Synthetic oligonucleotide
ugggugacauggucuugac

SEQ ID NO: 3290237 - RNA, 19 nt, Artificial Sequence
  Description of Artificial Sequence: Synthetic oligonucleotide
gggugacauggucuugacc

SEQ ID NO: 3290238 - RNA, 19 nt, Artificial Sequence
  Description of Artificial Sequence: Synthetic oligonucleotide
gugacauggucuugacccc

SEQ ID NO: 3290239 - RNA, 19 nt, Artificial Sequence
  Description of Artificial Sequence: Synthetic oligonucleotide
ugacauggucuugacccca

SEQ ID NO: 3290240 - RNA, 19 nt, Artificial Sequence
  Description of Artificial Sequence: Synthetic oligonucleotide
gacauggucuugaccccau

SEQ ID NO: 3290241 - RNA, 19 nt, Artificial Sequence
  Description of Artificial Sequence: Synthetic oligonucleotide
acauggucuugaccccauu

SEQ ID NO: 3290242 - RNA, 19 nt, Artificial Sequence
  Description of Artificial Sequence: Synthetic oligonucleotide
cauggucuugaccccauuc

SEQ ID NO: 3290243 - RNA, 19 nt, Artificial Sequence
  Description of Artificial Sequence: Synthetic oligonucleotide
auggucuugaccccauucc

SEQ ID NO: 3290244 - RNA, 19 nt, Artificial Sequence
  Description of Artificial Sequence: Synthetic oligonucleotide
cauucccagaugaggggcc

SEQ ID NO: 3290245 - RNA, 19 nt, Artificial Sequence
  Description of Artificial Sequence: Synthetic oligonucleotide
auucccagaugaggggccc

SEQ ID NO: 3290246 - RNA, 19 nt, Artificial Sequence
  Description of Artificial Sequence: Synthetic oligonucleotide
uggugguggucccagaaca

SEQ ID NO: 3290247 - RNA, 19 nt, Artificial Sequence
  Description of Artificial Sequence: Synthetic oligonucleotide
ggucccagaacagacgccu

SEQ ID NO: 3290248 - RNA, 19 nt, Artificial Sequence
  Description of Artificial Sequence: Synthetic oligonucleotide
gucccagaacagacgccuc

SEQ ID NO: 3290249 - RNA, 19 nt, Artificial Sequence
  Description of Artificial Sequence: Synthetic oligonucleotide
ucccagaacagacgccucc

SEQ ID NO: 3290250 - RNA, 19 nt, Artificial Sequence
  Description of Artificial Sequence: Synthetic oligonucleotide
cccagaacagacgccucca

SEQ ID NO: 3290251 - RNA, 19 nt, Artificial Sequence
  Description of Artificial Sequence: Synthetic oligonucleotide
ccagaacagacgccuccac

SEQ ID NO: 3290252 - RNA, 19 nt, Artificial Sequence
  Description of Artificial Sequence: Synthetic oligonucleotide
gaacagacgccuccacucu

SEQ ID NO: 3290253 - RNA, 19 nt, Artificial Sequence
  Description of Artificial Sequence: Synthetic oligonucleotide
agacgccuccacucuugcu

SEQ ID NO: 3290254 - RNA, 19 nt, Artificial Sequence
  Description of Artificial Sequence: Synthetic oligonucleotide
cuccacucuugcugagccc

SEQ ID NO: 3290255 - RNA, 19 nt, Artificial Sequence
  Description of Artificial Sequence: Synthetic oligonucleotide
acucuugcugagccccacc

SEQ ID NO: 3290256 - RNA, 19 nt, Artificial Sequence
  Description of Artificial Sequence: Synthetic oligonucleotide
cucuugcugagccccacca

SEQ ID NO: 3290257 - RNA, 19 nt, Artificial Sequence
  Description of Artificial Sequence: Synthetic oligonucleotide
cugagccccaccauagacc

SEQ ID NO: 3290258 - RNA, 19 nt, Artificial Sequence
  Description of Artificial Sequence: Synthetic oligonucleotide
gagccccaccauagaccuc

SEQ ID NO: 3290259 - RNA, 19 nt, Artificial Sequence
  Description of Artificial Sequence: Synthetic oligonucleotide
accauagaccuccccgcuc

SEQ ID NO: 3290260 - RNA, 19 nt, Artificial Sequence
  Description of Artificial Sequence: Synthetic oligonucleotide
cccugaaaacccgcugaag

SEQ ID NO: 3290261 - RNA, 19 nt, Artificial Sequence
  Description of Artificial Sequence: Synthetic oligonucleotide
ccugaaaacccgcugaagc

SEQ ID NO: 3290262 - RNA, 19 nt, Artificial Sequence
  Description of Artificial Sequence: Synthetic oligonucleotide
acccgcugaagcggcucuu

SEQ ID NO: 3290263 - RNA, 19 nt, Artificial Sequence
  Description of Artificial Sequence: Synthetic oligonucleotide
gaagcggcucuuggugccu

SEQ ID NO: 3290264 - RNA, 19 nt, Artificial Sequence
  Description of Artificial Sequence: Synthetic oligonucleotide
gaugaagagugggaguucg

SEQ ID NO: 3290265 - RNA, 19 nt, Artificial Sequence
  Description of Artificial Sequence: Synthetic oligonucleotide
augaagagugggaguucga

SEQ ID NO: 3290266 - RNA, 19 nt, Artificial Sequence
  Description of Artificial Sequence: Synthetic oligonucleotide
agugggaguucgaggugac

SEQ ID NO: 3290267 - RNA, 19 nt, Artificial Sequence
  Description of Artificial Sequence: Synthetic oligonucleotide
gugggaguucgaggugacu

SEQ ID NO: 3290268 - RNA, 19 nt, Artificial Sequence
  Description of Artificial Sequence: Synthetic oligonucleotide
ugggaguucgaggugacug

SEQ ID NO: 3290269 - RNA, 19 nt, Artificial Sequence
  Description of Artificial Sequence: Synthetic oligonucleotide
aguucgaggugacugccuu

SEQ ID NO: 3290270 - RNA, 19 nt, Artificial Sequence
  Description of Artificial Sequence: Synthetic oligonucleotide
guucgaggugacugccuuc

SEQ ID NO: 3290271 - RNA, 19 nt, Artificial Sequence
  Description of Artificial Sequence: Synthetic oligonucleotide
ucgaggugacugccuucua

SEQ ID NO: 3290272 - RNA, 19 nt, Artificial Sequence
  Description of Artificial Sequence: Synthetic oligonucleotide
aggugacugccuucuaucg

SEQ ID NO: 3290273 - RNA, 19 nt, Artificial Sequence
  Description of Artificial Sequence: Synthetic oligonucleotide
ggugacugccuucuaucgg

SEQ ID NO: 3290274 - RNA, 19 nt, Artificial Sequence
  Description of Artificial Sequence: Synthetic oligonucleotide
gugacugccuucuaucggg

SEQ ID NO: 3290275 - RNA, 19 nt, Artificial Sequence
  Description of Artificial Sequence: Synthetic oligonucleotide
ugacugccuucuaucgggg

SEQ ID NO: 3290276 - RNA, 19 nt, Artificial Sequence
  Description of Artificial Sequence: Synthetic oligonucleotide
gacugccuucuaucggggc

SEQ ID NO: 3290277 - RNA, 19 nt, Artificial Sequence
  Description of Artificial Sequence: Synthetic oligonucleotide
acugccuucuaucggggcc

SEQ ID NO: 3290278 - RNA, 19 nt, Artificial Sequence
  Description of Artificial Sequence: Synthetic oligonucleotide
uucuaucggggccgccaag

SEQ ID NO: 3290279 - RNA, 19 nt, Artificial Sequence
  Description of Artificial Sequence: Synthetic oligonucleotide
ucuaucggggccgccaagu

SEQ ID NO: 3290280 - RNA, 19 nt, Artificial Sequence
  Description of Artificial Sequence: Synthetic oligonucleotide
aucggggccgccaagucuu

SEQ ID NO: 3290281 - RNA, 19 nt, Artificial Sequence
  Description of Artificial Sequence: Synthetic oligonucleotide
agucuuccagcagacaguc

SEQ ID NO: 3290282 - RNA, 19 nt, Artificial Sequence
  Description of Artificial Sequence: Synthetic oligonucleotide
aggaggggacacgaugcug

SEQ ID NO: 3290283 - RNA, 19 nt, Artificial Sequence
  Description of Artificial Sequence: Synthetic oligonucleotide
gcugccuggacagccaaua

SEQ ID NO: 3290284 - RNA, 19 nt, Artificial Sequence
  Description of Artificial Sequence: Synthetic oligonucleotide
cugccuggacagccaauaa

SEQ ID NO: 3290285 - RNA, 19 nt, Artificial Sequence
  Description of Artificial Sequence: Synthetic oligonucleotide
ugccuggacagccaauaau

SEQ ID NO: 3290286 - RNA, 19 nt, Artificial Sequence
  Description of Artificial Sequence: Synthetic oligonucleotide
gccuggacagccaauaaua

SEQ ID NO: 3290287 - RNA, 19 nt, Artificial Sequence
  Description of Artificial Sequence: Synthetic oligonucleotide
ccuggacagccaauaauac

SEQ ID NO: 3290288 - RNA, 19 nt, Artificial Sequence
  Description of Artificial Sequence: Synthetic oligonucleotide
acagccaauaauacugcca

SEQ ID NO: 3290289 - RNA, 19 nt, Artificial Sequence
  Description of Artificial Sequence: Synthetic oligonucleotide
cagccaauaauacugccag

SEQ ID NO: 3290290 - RNA, 19 nt, Artificial Sequence
  Description of Artificial Sequence: Synthetic oligonucleotide
ccaauaauacugccagacc

SEQ ID NO: 3290291 - RNA, 19 nt, Artificial Sequence
  Description of Artificial Sequence: Synthetic oligonucleotide
uaauacugccagaccccgg

SEQ ID NO: 3290292 - RNA, 19 nt, Artificial Sequence
  Description of Artificial Sequence: Synthetic oligonucleotide
aauacugccagaccccggg

SEQ ID NO: 3290293 - RNA, 19 nt, Artificial Sequence
  Description of Artificial Sequence: Synthetic oligonucleotide
cccgggguguugguaacag

SEQ ID NO: 3290294 - RNA, 19 nt, Artificial Sequence
  Description of Artificial Sequence: Synthetic oligonucleotide
ccgggguguugguaacaga

SEQ ID NO: 3290295 - RNA, 19 nt, Artificial Sequence
  Description of Artificial Sequence: Synthetic oligonucleotide
cgggguguugguaacagac

SEQ ID NO: 3290296 - RNA, 19 nt, Artificial Sequence
  Description of Artificial Sequence: Synthetic oligonucleotide
gggguguugguaacagaca

SEQ ID NO: 3290297 - RNA, 19 nt, Artificial Sequence
  Description of Artificial Sequence: Synthetic oligonucleotide
gguguugguaacagacaag

SEQ ID NO: 3290298 - RNA, 19 nt, Artificial Sequence
  Description of Artificial Sequence: Synthetic oligonucleotide
gguaacagacaagaccgug

SEQ ID NO: 3290299 - RNA, 19 nt, Artificial Sequence
  Description of Artificial Sequence: Synthetic oligonucleotide
aacagacaagaccgugaug

SEQ ID NO: 3290300 - RNA, 19 nt, Artificial Sequence
  Description of Artificial Sequence: Synthetic oligonucleotide
agacaagaccgugaugggc

SEQ ID NO: 3290301 - RNA, 19 nt, Artificial Sequence
  Description of Artificial Sequence: Synthetic oligonucleotide
gaccgugaugggcuacgug

SEQ ID NO: 3290302 - RNA, 19 nt, Artificial Sequence
  Description of Artificial Sequence: Synthetic oligonucleotide
ugaugggcuacgugaggcg

SEQ ID NO: 3290303 - RNA, 19 nt, Artificial Sequence
  Description of Artificial Sequence: Synthetic oligonucleotide
gaugggcuacgugaggcgu

SEQ ID NO: 3290304 - RNA, 19 nt, Artificial Sequence
  Description of Artificial Sequence: Synthetic oligonucleotide
gggcuacgugaggcgugua

SEQ ID NO: 3290305 - RNA, 19 nt, Artificial Sequence
  Description of Artificial Sequence: Synthetic oligonucleotide
ggcuacgugaggcguguac

SEQ ID NO: 3290306 - RNA, 19 nt, Artificial Sequence
  Description of Artificial Sequence: Synthetic oligonucleotide
cuacgugaggcguguacug

SEQ ID NO: 3290307 - RNA, 19 nt, Artificial Sequence
  Description of Artificial Sequence: Synthetic oligonucleotide
uacgugaggcguguacuga

SEQ ID NO: 3290308 - RNA, 19 nt, Artificial Sequence
  Description of Artificial Sequence: Synthetic oligonucleotide
acgugaggcguguacugag

SEQ ID NO: 3290309 - RNA, 19 nt, Artificial Sequence
  Description of Artificial Sequence: Synthetic oligonucleotide
cgugaggcguguacugagc

SEQ ID NO: 3290310 - RNA, 19 nt, Artificial Sequence
  Description of Artificial Sequence: Synthetic oligonucleotide
gugaggcguguacugagcu

SEQ ID NO: 3290311 - RNA, 19 nt, Artificial Sequence
  Description of Artificial Sequence: Synthetic oligonucleotide
ugaggcguguacugagcug

SEQ ID NO: 3290312 - RNA, 19 nt, Artificial Sequence
  Description of Artificial Sequence: Synthetic oligonucleotide
aggcguguacugagcugcu

SEQ ID NO: 3290313 - RNA, 19 nt, Artificial Sequence
  Description of Artificial Sequence: Synthetic oligonucleotide
ggcguguacugagcugcuu

SEQ ID NO: 3290314 - RNA, 19 nt, Artificial Sequence
  Description of Artificial Sequence: Synthetic oligonucleotide
cguguacugagcugcuugg

SEQ ID NO: 3290315 - RNA, 19 nt, Artificial Sequence
  Description of Artificial Sequence: Synthetic oligonucleotide
uguacugagcugcuugggu

SEQ ID NO: 3290316 - RNA, 19 nt, Artificial Sequence
  Description of Artificial Sequence: Synthetic oligonucleotide
guacugagcugcuugggug

SEQ ID NO: 3290317 - RNA, 19 nt, Artificial Sequence
  Description of Artificial Sequence: Synthetic oligonucleotide
acugagcugcuuggguggg

SEQ ID NO: 3290318 - RNA, 19 nt, Artificial Sequence
  Description of Artificial Sequence: Synthetic oligonucleotide
gggacuagcucuguggagg

SEQ ID NO: 3290319 - RNA, 19 nt, Artificial Sequence
  Description of Artificial Sequence: Synthetic oligonucleotide
acuagcucuguggagggca

SEQ ID NO: 3290320 - RNA, 19 nt, Artificial Sequence
  Description of Artificial Sequence: Synthetic oligonucleotide
cuagcucuguggagggcag

SEQ ID NO: 3290321 - RNA, 19 nt, Artificial Sequence
  Description of Artificial Sequence: Synthetic oligonucleotide
cuggggcacugccacacau

SEQ ID NO: 3290322 - RNA, 19 nt, Artificial Sequence
  Description of Artificial Sequence: Synthetic oligonucleotide
uggggcacugccacacaua

SEQ ID NO: 3290323 - RNA, 19 nt, Artificial Sequence
  Description of Artificial Sequence: Synthetic oligonucleotide
ggggcacugccacacauac

SEQ ID NO: 3290324 - RNA, 19 nt, Artificial Sequence
  Description of Artificial Sequence: Synthetic oligonucleotide
ggcacugccacacauacug

SEQ ID NO: 3290325 - RNA, 19 nt, Artificial Sequence
  Description of Artificial Sequence: Synthetic oligonucleotide
gcacugccacacauacugg

SEQ ID NO: 3290326 - RNA, 19 nt, Artificial Sequence
  Description of Artificial Sequence: Synthetic oligonucleotide
acugccacacauacugggc

SEQ ID NO: 3290327 - RNA, 19 nt, Artificial Sequence
  Description of Artificial Sequence: Synthetic oligonucleotide
cugccacacauacugggcc

SEQ ID NO: 3290328 - RNA, 19 nt, Artificial Sequence
  Description of Artificial Sequence: Synthetic oligonucleotide
ugccacacauacugggccc

SEQ ID NO: 3290329 - RNA, 19 nt, Artificial Sequence
  Description of Artificial Sequence: Synthetic oligonucleotide
agcuucucccugacagcag

SEQ ID NO: 3290330 - RNA, 19 nt, Artificial Sequence
  Description of Artificial Sequence: Synthetic oligonucleotide
ucucccugacagcaguccc

SEQ ID NO: 3290331 - RNA, 19 nt, Artificial Sequence
  Description of Artificial Sequence: Synthetic oligonucleotide
aagauggagaccuguucga

SEQ ID NO: 3290332 - RNA, 19 nt, Artificial Sequence
  Description of Artificial Sequence: Synthetic oligonucleotide
auggagaccuguucgaccu

SEQ ID NO: 3290333 - RNA, 19 nt, Artificial Sequence
  Description of Artificial Sequence: Synthetic oligonucleotide
uggagaccuguucgaccug

SEQ ID NO: 3290334 - RNA, 19 nt, Artificial Sequence
  Description of Artificial Sequence: Synthetic oligonucleotide
ggagaccuguucgaccuga

SEQ ID NO: 3290335 - RNA, 19 nt, Artificial Sequence
  Description of Artificial Sequence: Synthetic oligonucleotide
gaccuguucgaccugaggc

SEQ ID NO: 3290336 - RNA, 19 nt, Artificial Sequence
  Description of Artificial Sequence: Synthetic oligonucleotide
accuguucgaccugaggcc

SEQ ID NO: 3290337 - RNA, 19 nt, Artificial Sequence
  Description of Artificial Sequence: Synthetic oligonucleotide
uguucgaccugaggcccuu

SEQ ID NO: 3290338 - RNA, 19 nt, Artificial Sequence
  Description of Artificial Sequence: Synthetic oligonucleotide
ccugaggcccuucguguca

SEQ ID NO: 3290339 - RNA, 19 nt, Artificial Sequence
  Description of Artificial Sequence: Synthetic oligonucleotide
aggcccuucgugucagauc

SEQ ID NO: 3290340 - RNA, 19 nt, Artificial Sequence
  Description of Artificial Sequence: Synthetic oligonucleotide
cccuucgugucagaucuga

SEQ ID NO: 3290341 - RNA, 19 nt, Artificial Sequence
  Description of Artificial Sequence: Synthetic oligonucleotide
ccuucgugucagaucugau

SEQ ID NO: 3290342 - RNA, 19 nt, Artificial Sequence
  Description of Artificial Sequence: Synthetic oligonucleotide
uucgugucagaucugauug

SEQ ID NO: 3290343 - RNA, 19 nt, Artificial Sequence
  Description of Artificial Sequence: Synthetic oligonucleotide
ucgugucagaucugauugc

SEQ ID NO: 3290344 - RNA, 19 nt, Artificial Sequence
  Description of Artificial Sequence: Synthetic oligonucleotide
gucagaucugauugccuuc

SEQ ID NO: 3290345 - RNA, 19 nt, Artificial Sequence
  Description of Artificial Sequence: Synthetic oligonucleotide
cagaucugauugccuucau

SEQ ID NO: 3290346 - RNA, 19 nt, Artificial Sequence
  Description of Artificial Sequence: Synthetic oligonucleotide
gaucugauugccuucauca

SEQ ID NO: 3290347 - RNA, 19 nt, Artificial Sequence
  Description of Artificial Sequence: Synthetic oligonucleotide
aucugauugccuucaucaa

SEQ ID NO: 3290348 - RNA, 19 nt, Artificial Sequence
  Description of Artificial Sequence: Synthetic oligonucleotide
cuucaucaaaggaagccga

SEQ ID NO: 3290349 - RNA, 19 nt, Artificial Sequence
  Description of Artificial Sequence: Synthetic oligonucleotide
uucaucaaaggaagccgac

SEQ ID NO: 3290350 - RNA, 19 nt, Artificial Sequence
  Description of Artificial Sequence: Synthetic oligonucleotide
ucaucaaaggaagccgaca

SEQ ID NO: 3290351 - RNA, 19 nt, Artificial Sequence
  Description of Artificial Sequence: Synthetic oligonucleotide
caucaaaggaagccgacac

SEQ ID NO: 3290352 - RNA, 19 nt, Artificial Sequence
  Description of Artificial Sequence: Synthetic oligonucleotide
aucaaaggaagccgacacu

SEQ ID NO: 3290353 - RNA, 19 nt, Artificial Sequence
  Description of Artificial Sequence: Synthetic oligonucleotide
aaaggaagccgacacucac

SEQ ID NO: 3290354 - RNA, 19 nt, Artificial Sequence
  Description of Artificial Sequence: Synthetic oligonucleotide
aaggaagccgacacucacc

SEQ ID NO: 3290355 - RNA, 19 nt, Artificial Sequence
  Description of Artificial Sequence: Synthetic oligonucleotide
aggaagccgacacucacca

SEQ ID NO: 3290356 - RNA, 19 nt, Artificial Sequence
  Description of Artificial Sequence: Synthetic oligonucleotide
aagccgacacucaccacgc

SEQ ID NO: 3290357 - RNA, 19 nt, Artificial Sequence
  Description of Artificial Sequence: Synthetic oligonucleotide
agccgacacucaccacgcu

SEQ ID NO: 3290358 - RNA, 19 nt, Artificial Sequence
  Description of Artificial Sequence: Synthetic oligonucleotide
gccgacacucaccacgcua

SEQ ID NO: 3290359 - RNA, 19 nt, Artificial Sequence
  Description of Artificial Sequence: Synthetic oligonucleotide
ccgacacucaccacgcuac

SEQ ID NO: 3290360 - RNA, 19 nt, Artificial Sequence
  Description of Artificial Sequence: Synthetic oligonucleotide
acacucaccacgcuacacc

SEQ ID NO: 3290361 - RNA, 19 nt, Artificial Sequence
  Description of Artificial Sequence: Synthetic oligonucleotide
cacucaccacgcuacaccc

SEQ ID NO: 3290362 - RNA, 19 nt, Artificial Sequence
  Description of Artificial Sequence: Synthetic oligonucleotide
cucaccacgcuacacccuc

SEQ ID NO: 3290363 - RNA, 19 nt, Artificial Sequence
  Description of Artificial Sequence: Synthetic oligonucleotide
accacgcuacacccucugg

SEQ ID NO: 3290364 - RNA, 19 nt, Artificial Sequence
  Description of Artificial Sequence: Synthetic oligonucleotide
cacgcuacacccucugguu

SEQ ID NO: 3290365 - RNA, 19 nt, Artificial Sequence
  Description of Artificial Sequence: Synthetic oligonucleotide
acgcuacacccucugguuc

SEQ ID NO: 3290366 - RNA, 19 nt, Artificial Sequence
  Description of Artificial Sequence: Synthetic oligonucleotide
gcuacacccucugguucug

SEQ ID NO: 3290367 - RNA, 19 nt, Artificial Sequence
  Description of Artificial Sequence: Synthetic oligonucleotide
cuacacccucugguucugu

SEQ ID NO: 3290368 - RNA, 19 nt, Artificial Sequence
  Description of Artificial Sequence: Synthetic oligonucleotide
caagaccagccguggacca

SEQ ID NO: 3290369 - RNA, 19 nt, Artificial Sequence
  Description of Artificial Sequence: Synthetic oligonucleotide
aagaccagccguggaccaa

SEQ ID NO: 3290370 - RNA, 19 nt, Artificial Sequence
  Description of Artificial Sequence: Synthetic oligonucleotide
agaccagccguggaccaag

SEQ ID NO: 3290371 - RNA, 19 nt, Artificial Sequence
  Description of Artificial Sequence: Synthetic oligonucleotide
gugaugcucaagguuguuc

SEQ ID NO: 3290372 - RNA, 19 nt, Artificial Sequence
  Description of Artificial Sequence: Synthetic oligonucleotide
ugaugcucaagguuguucc

SEQ ID NO: 3290373 - RNA, 19 nt, Artificial Sequence
  Description of Artificial Sequence: Synthetic oligonucleotide
gaugcucaagguuguuccc

SEQ ID NO: 3290374 - RNA, 19 nt, Artificial Sequence
  Description of Artificial Sequence: Synthetic oligonucleotide
augcucaagguuguuccca

SEQ ID NO: 3290375 - RNA, 19 nt, Artificial Sequence
  Description of Artificial Sequence: Synthetic oligonucleotide
ugcucaagguuguucccac

SEQ ID NO: 3290376 - RNA, 19 nt, Artificial Sequence
  Description of Artificial Sequence: Synthetic oligonucleotide
gcucaagguuguucccacg

SEQ ID NO: 3290377 - RNA, 19 nt, Artificial Sequence
  Description of Artificial Sequence: Synthetic oligonucleotide
ucaagguuguucccacgug

SEQ ID NO: 3290378 - RNA, 19 nt, Artificial Sequence
  Description of Artificial Sequence: Synthetic oligonucleotide
aagguuguucccacgugcc

SEQ ID NO: 3290379 - RNA, 19 nt, Artificial Sequence
  Description of Artificial Sequence: Synthetic oligonucleotide
agguuguucccacgugccu

SEQ ID NO: 3290380 - RNA, 19 nt, Artificial Sequence
  Description of Artificial Sequence: Synthetic oligonucleotide
gguuguucccacgugccuu

SEQ ID NO: 3290381 - RNA, 19 nt, Artificial Sequence
  Description of Artificial Sequence: Synthetic oligonucleotide
guuguucccacgugccuua

SEQ ID NO: 3290382 - RNA, 19 nt, Artificial Sequence
  Description of Artificial Sequence: Synthetic oligonucleotide
uuguucccacgugccuuag

SEQ ID NO: 3290383 - RNA, 19 nt, Artificial Sequence
  Description of Artificial Sequence: Synthetic oligonucleotide
uguucccacgugccuuagg

SEQ ID NO: 3290384 - RNA, 19 nt, Artificial Sequence
  Description of Artificial Sequence: Synthetic oligonucleotide
guucccacgugccuuaggg

SEQ ID NO: 3290385 - RNA, 19 nt, Artificial Sequence
  Description of Artificial Sequence: Synthetic oligonucleotide
uucccacgugccuuagggc

SEQ ID NO: 3290386 - RNA, 19 nt, Artificial Sequence
  Description of Artificial Sequence: Synthetic oligonucleotide
uagggcccugcuggaaaug

SEQ ID NO: 3290387 - RNA, 19 nt, Artificial Sequence
  Description of Artificial Sequence: Synthetic oligonucleotide
agggcccugcuggaaaugg

SEQ ID NO: 3290388 - RNA, 19 nt, Artificial Sequence
  Description of Artificial Sequence: Synthetic oligonucleotide
ccugcuggaaauggcacgg

SEQ ID NO: 3290389 - RNA, 19 nt, Artificial Sequence
  Description of Artificial Sequence: Synthetic oligonucleotide
ugcuggaaauggcacgguu

SEQ ID NO: 3290390 - RNA, 19 nt, Artificial Sequence
  Description of Artificial Sequence: Synthetic oligonucleotide
gcuggaaauggcacgguua

SEQ ID NO: 3290391 - RNA, 19 nt, Artificial Sequence
  Description of Artificial Sequence: Synthetic oligonucleotide
cuggaaauggcacgguuag

SEQ ID NO: 3290392 - RNA, 19 nt, Artificial Sequence
  Description of Artificial Sequence: Synthetic oligonucleotide
uggaaauggcacgguuaga

SEQ ID NO: 3290393 - RNA, 19 nt, Artificial Sequence
  Description of Artificial Sequence: Synthetic oligonucleotide
ggaaauggcacgguuagag

SEQ ID NO: 3290394 - RNA, 19 nt, Artificial Sequence
  Description of Artificial Sequence: Synthetic oligonucleotide
gaaauggcacgguuagagg

SEQ ID NO: 3290395 - RNA, 19 nt, Artificial Sequence
  Description of Artificial Sequence: Synthetic oligonucleotide
aauggcacgguuagagggc

SEQ ID NO: 3290396 - RNA, 19 nt, Artificial Sequence
  Description of Artificial Sequence: Synthetic oligonucleotide
auggcacgguuagagggcg

SEQ ID NO: 3290397 - RNA, 19 nt, Artificial Sequence
  Description of Artificial Sequence: Synthetic oligonucleotide
acgguuagagggcgcuucc

SEQ ID NO: 3290398 - RNA, 19 nt, Artificial Sequence
  Description of Artificial Sequence: Synthetic oligonucleotide
cgguuagagggcgcuuccu

SEQ ID NO: 3290399 - RNA, 19 nt, Artificial Sequence
  Description of Artificial Sequence: Synthetic oligonucleotide
gguuagagggcgcuuccuc

SEQ ID NO: 3290400 - RNA, 19 nt, Artificial Sequence
  Description of Artificial Sequence: Synthetic oligonucleotide
uuagagggcgcuuccuccc

SEQ ID NO: 3290401 - RNA, 19 nt, Artificial Sequence
  Description of Artificial Sequence: Synthetic oligonucleotide
uagagggcgcuuccucccu

SEQ ID NO: 3290402 - RNA, 19 nt, Artificial Sequence
  Description of Artificial Sequence: Synthetic oligonucleotide
acacuguggaccugcacau

SEQ ID NO: 3290403 - RNA, 19 nt, Artificial Sequence
  Description of Artificial Sequence: Synthetic oligonucleotide
cuguggaccugcacauuuc

SEQ ID NO: 3290404 - RNA, 19 nt, Artificial Sequence
  Description of Artificial Sequence: Synthetic oligonucleotide
guggaccugcacauuucca

SEQ ID NO: 3290405 - RNA, 19 nt, Artificial Sequence
  Description of Artificial Sequence: Synthetic oligonucleotide
ccugcacauuuccaacagc

SEQ ID NO: 3290406 - RNA, 19 nt, Artificial Sequence
  Description of Artificial Sequence: Synthetic oligonucleotide
gcacauuuccaacagcuac

SEQ ID NO: 3290407 - RNA, 19 nt, Artificial Sequence
  Description of Artificial Sequence: Synthetic oligonucleotide
ccaacagcuacccacucac

SEQ ID NO: 3290408 - RNA, 19 nt, Artificial Sequence
  Description of Artificial Sequence: Synthetic oligonucleotide
caacagcuacccacucacu

SEQ ID NO: 3290409 - RNA, 19 nt, Artificial Sequence
  Description of Artificial Sequence: Synthetic oligonucleotide
aacagcuacccacucacuc

SEQ ID NO: 3290410 - RNA, 19 nt, Artificial Sequence
  Description of Artificial Sequence: Synthetic oligonucleotide
acagcuacccacucacucu

SEQ ID NO: 3290411 - RNA, 19 nt, Artificial Sequence
  Description of Artificial Sequence: Synthetic oligonucleotide
cagcuacccacucacucuc

SEQ ID NO: 3290412 - RNA, 19 nt, Artificial Sequence
  Description of Artificial Sequence: Synthetic oligonucleotide
agcuacccacucacucuca

SEQ ID NO: 3290413 - RNA, 19 nt, Artificial Sequence
  Description of Artificial Sequence: Synthetic oligonucleotide
acccacucacucucaccuc

SEQ ID NO: 3290414 - RNA, 19 nt, Artificial Sequence
  Description of Artificial Sequence: Synthetic oligonucleotide
cucacucucaccucggacc

SEQ ID NO: 3290415 - RNA, 19 nt, Artificial Sequence
  Description of Artificial Sequence: Synthetic oligonucleotide
ucacucucaccucggacca

SEQ ID NO: 3290416 - RNA, 19 nt, Artificial Sequence
  Description of Artificial Sequence: Synthetic oligonucleotide
cacucucaccucggaccag

SEQ ID NO: 3290417 - RNA, 19 nt, Artificial Sequence
  Description of Artificial Sequence: Synthetic oligonucleotide
acucucaccucggaccagu

SEQ ID NO: 3290418 - RNA, 19 nt, Artificial Sequence
  Description of Artificial Sequence: Synthetic oligonucleotide
ucucaccucggaccaguac

SEQ ID NO: 3290419 - RNA, 19 nt, Artificial Sequence
  Description of Artificial Sequence: Synthetic oligonucleotide
ucaccucggaccaguacaa

SEQ ID NO: 3290420 - RNA, 19 nt, Artificial Sequence
  Description of Artificial Sequence: Synthetic oligonucleotide
caccucggaccaguacaag

SEQ ID NO: 3290421 - RNA, 19 nt, Artificial Sequence
  Description of Artificial Sequence: Synthetic oligonucleotide
accucggaccaguacaagg

SEQ ID NO: 3290422 - RNA, 19 nt, Artificial Sequence
  Description of Artificial Sequence: Synthetic oligonucleotide
cggaccaguacaaggcgua

SEQ ID NO: 3290423 - RNA, 19 nt, Artificial Sequence
  Description of Artificial Sequence: Synthetic oligonucleotide
ggaccaguacaaggcguac

SEQ ID NO: 3290424 - RNA, 19 nt, Artificial Sequence
  Description of Artificial Sequence: Synthetic oligonucleotide
ccaguacaaggcguaccuc

SEQ ID NO: 3290425 - RNA, 19 nt, Artificial Sequence
  Description of Artificial Sequence: Synthetic oligonucleotide
caguacaaggcguaccucc

SEQ ID NO: 3290426 - RNA, 19 nt, Artificial Sequence
  Description of Artificial Sequence: Synthetic oligonucleotide
aguacaaggcguaccucca

SEQ ID NO: 3290427 - RNA, 19 nt, Artificial Sequence
  Description of Artificial Sequence: Synthetic oligonucleotide
guacaaggcguaccuccag

SEQ ID NO: 3290428 - RNA, 19 nt, Artificial Sequence
  Description of Artificial Sequence: Synthetic oligonucleotide
cuccaggaccugguugagg

SEQ ID NO: 3290429 - RNA, 19 nt, Artificial Sequence
  Description of Artificial Sequence: Synthetic oligonucleotide
gguugaggacauggauuuc

SEQ ID NO: 3290430 - RNA, 19 nt, Artificial Sequence
  Description of Artificial Sequence: Synthetic oligonucleotide
aggacauggauuucugggu

SEQ ID NO: 3290431 - RNA, 19 nt, Artificial Sequence
  Description of Artificial Sequence: Synthetic oligonucleotide
auggauuucugggucacug

SEQ ID NO: 3290432 - RNA, 19 nt, Artificial Sequence
  Description of Artificial Sequence: Synthetic oligonucleotide
gucacuggggaggucugac

SEQ ID NO: 3290433 - RNA, 19 nt, Artificial Sequence
  Description of Artificial Sequence: Synthetic oligonucleotide
ucacuggggaggucugacc

SEQ ID NO: 3290434 - RNA, 19 nt, Artificial Sequence
  Description of Artificial Sequence: Synthetic oligonucleotide
accggugcugccuucuugu

SEQ ID NO: 3290435 - RNA, 19 nt, Artificial Sequence
  Description of Artificial Sequence: Synthetic oligonucleotide
ccggugcugccuucuugug

SEQ ID NO: 3290436 - RNA, 19 nt, Artificial Sequence
  Description of Artificial Sequence: Synthetic oligonucleotide
cggugcugccuucuugugc

SEQ ID NO: 3290437 - RNA, 19 nt, Artificial Sequence
  Description of Artificial Sequence: Synthetic oligonucleotide
ugccuucuugugccuucac

SEQ ID NO: 3290438 - RNA, 19 nt, Artificial Sequence
  Description of Artificial Sequence: Synthetic oligonucleotide
gccuucuugugccuucacc

SEQ ID NO: 3290439 - RNA, 19 nt, Artificial Sequence
  Description of Artificial Sequence: Synthetic oligonucleotide
gccuucacccuggccaaua

SEQ ID NO: 3290440 - RNA, 19 nt, Artificial Sequence
  Description of Artificial Sequence: Synthetic oligonucleotide
ccuucacccuggccaauaa

SEQ ID NO: 3290441 - RNA, 19 nt, Artificial Sequence
  Description of Artificial Sequence: Synthetic oligonucleotide
cacccuggccaauaaacug

SEQ ID NO: 3290442 - RNA, 19 nt, Artificial Sequence
  Description of Artificial Sequence: Synthetic oligonucleotide
cccuggccaauaaacuguu

SEQ ID NO: 3290443 - RNA, 19 nt, Artificial Sequence
  Description of Artificial Sequence: Synthetic oligonucleotide
ccuggccaauaaacuguuu

SEQ ID NO: 3290444 - RNA, 19 nt, Artificial Sequence
  Description of Artificial Sequence: Synthetic oligonucleotide
ggccaauaaacuguuucuu

SEQ ID NO: 3290445 - RNA, 19 nt, Artificial Sequence
  Description of Artificial Sequence: Synthetic oligonucleotide
aauaaacuguuucuugcca

SEQ ID NO: 3290446 - RNA, 19 nt, Artificial Sequence
  Description of Artificial Sequence: Synthetic oligonucleotide
ggaguguaggcaccgcuga

SEQ ID NO: 3290447 - RNA, 19 nt, Artificial Sequence
  Description of Artificial Sequence: Synthetic oligonucleotide
aggaguguaggcaccgcug

SEQ ID NO: 3290448 - RNA, 19 nt, Artificial Sequence
  Description of Artificial Sequence: Synthetic oligonucleotide
caggaguguaggcaccgcu

SEQ ID NO: 3290449 - RNA, 19 nt, Artificial Sequence
  Description of Artificial Sequence: Synthetic oligonucleotide
uccaggaguguaggcaccg

SEQ ID NO: 3290450 - RNA, 19 nt, Artificial Sequence
  Description of Artificial Sequence: Synthetic oligonucleotide
auccuuuccaggaguguag

SEQ ID NO: 3290451 - RNA, 19 nt, Artificial Sequence
  Description of Artificial Sequence: Synthetic oligonucleotide
gguuuauccuuuccaggag

SEQ ID NO: 3290452 - RNA, 19 nt, Artificial Sequence
  Description of Artificial Sequence: Synthetic oligonucleotide
agguuuauccuuuccagga

SEQ ID NO: 3290453 - RNA, 19 nt, Artificial Sequence
  Description of Artificial Sequence: Synthetic oligonucleotide
cagguuuauccuuuccagg

SEQ ID NO: 3290454 - RNA, 19 nt, Artificial Sequence
  Description of Artificial Sequence: Synthetic oligonucleotide
gcagaucagguuuauccuu

SEQ ID NO: 3290455 - RNA, 19 nt, Artificial Sequence
  Description of Artificial Sequence: Synthetic oligonucleotide
ggcagaucagguuuauccu

SEQ ID NO: 3290456 - RNA, 19 nt, Artificial Sequence
  Description of Artificial Sequence: Synthetic oligonucleotide
gggcagaucagguuuaucc

SEQ ID NO: 3290457 - RNA, 19 nt, Artificial Sequence
  Description of Artificial Sequence: Synthetic oligonucleotide
ucggaaauuccucuuccag

SEQ ID NO: 3290458 - RNA, 19 nt, Artificial Sequence
  Description of Artificial Sequence: Synthetic oligonucleotide
aucggaaauuccucuucca

SEQ ID NO: 3290459 - RNA, 19 nt, Artificial Sequence
  Description of Artificial Sequence: Synthetic oligonucleotide
gaucggaaauuccucuucc

SEQ ID NO: 3290460 - RNA, 19 nt, Artificial Sequence
  Description of Artificial Sequence: Synthetic oligonucleotide
agaucggaaauuccucuuc

SEQ ID NO: 3290461 - RNA, 19 nt, Artificial Sequence
  Description of Artificial Sequence: Synthetic oligonucleotide
cagaucggaaauuccucuu

SEQ ID NO: 3290462 - RNA, 19 nt, Artificial Sequence
  Description of Artificial Sequence: Synthetic oligonucleotide
gcagaucggaaauuccucu

SEQ ID NO: 3290463 - RNA, 19 nt, Artificial Sequence
  Description of Artificial Sequence: Synthetic oligonucleotide
ggcagaucggaaauuccuc

SEQ ID NO: 3290464 - RNA, 19 nt, Artificial Sequence
  Description of Artificial Sequence: Synthetic oligonucleotide
gggcagaucggaaauuccu

SEQ ID NO: 3290465 - RNA, 19 nt, Artificial Sequence
  Description of Artificial Sequence: Synthetic oligonucleotide
cagggcagaucggaaauuc

SEQ ID NO: 3290466 - RNA, 19 nt, Artificial Sequence
  Description of Artificial Sequence: Synthetic oligonucleotide
cgguucagggcagaucgga

SEQ ID NO: 3290467 - RNA, 19 nt, Artificial Sequence
  Description of Artificial Sequence: Synthetic oligonucleotide
uccgguucagggcagaucg

SEQ ID NO: 3290468 - RNA, 19 nt, Artificial Sequence
  Description of Artificial Sequence: Synthetic oligonucleotide
uuccgguucagggcagauc

SEQ ID NO: 3290469 - RNA, 19 nt, Artificial Sequence
  Description of Artificial Sequence: Synthetic oligonucleotide
cuuccgguucagggcagau

SEQ ID NO: 3290470 - RNA, 19 nt, Artificial Sequence
  Description of Artificial Sequence: Synthetic oligonucleotide
acgcaacuccuccuuccgg

SEQ ID NO: 3290471 - RNA, 19 nt, Artificial Sequence
  Description of Artificial Sequence: Synthetic oligonucleotide
cacgcaacuccuccuuccg

SEQ ID NO: 3290472 - RNA, 19 nt, Artificial Sequence
  Description of Artificial Sequence: Synthetic oligonucleotide
cuacacgcaacuccuccuu

SEQ ID NO: 3290473 - RNA, 19 nt, Artificial Sequence
  Description of Artificial Sequence: Synthetic oligonucleotide
gcuacacgcaacuccuccu

SEQ ID NO: 3290474 - RNA, 19 nt, Artificial Sequence
  Description of Artificial Sequence: Synthetic oligonucleotide
agcuacacgcaacuccucc

SEQ ID NO: 3290475 - RNA, 19 nt, Artificial Sequence
  Description of Artificial Sequence: Synthetic oligonucleotide
cagcuacacgcaacuccuc

SEQ ID NO: 3290476 - RNA, 19 nt, Artificial Sequence
  Description of Artificial Sequence: Synthetic oligonucleotide
ucagcuacacgcaacuccu

SEQ ID NO: 3290477 - RNA, 19 nt, Artificial Sequence
  Description of Artificial Sequence: Synthetic oligonucleotide
uucagcuacacgcaacucc

SEQ ID NO: 3290478 - RNA, 19 nt, Artificial Sequence
  Description of Artificial Sequence: Synthetic oligonucleotide
ucuucagcuacacgcaacu

SEQ ID NO: 3290479 - RNA, 19 nt, Artificial Sequence
  Description of Artificial Sequence: Synthetic oligonucleotide
aucuucagcuacacgcaac

SEQ ID NO: 3290480 - RNA, 19 nt, Artificial Sequence
  Description of Artificial Sequence: Synthetic oligonucleotide
gaucuucagcuacacgcaa

SEQ ID NO: 3290481 - RNA, 19 nt, Artificial Sequence
  Description of Artificial Sequence: Synthetic oligonucleotide
cgaucuucagcuacacgca

SEQ ID NO: 3290482 - RNA, 19 nt, Artificial Sequence
  Description of Artificial Sequence: Synthetic oligonucleotide
uccgaucuucagcuacacg

SEQ ID NO: 3290483 - RNA, 19 nt, Artificial Sequence
  Description of Artificial Sequence: Synthetic oligonucleotide
cuccgaucuucagcuacac

SEQ ID NO: 3290484 - RNA, 19 nt, Artificial Sequence
  Description of Artificial Sequence: Synthetic oligonucleotide
gcuccgaucuucagcuaca

SEQ ID NO: 3290485 - RNA, 19 nt, Artificial Sequence
  Description of Artificial Sequence: Synthetic oligonucleotide
ugcuccgaucuucagcuac

SEQ ID NO: 3290486 - RNA, 19 nt, Artificial Sequence
  Description of Artificial Sequence: Synthetic oligonucleotide
ggucuuugcuccgaucuuc

SEQ ID NO: 3290487 - RNA, 19 nt, Artificial Sequence
  Description of Artificial Sequence: Synthetic oligonucleotide
ggggucuuugcuccgaucu

SEQ ID NO: 3290488 - RNA, 19 nt, Artificial Sequence
  Description of Artificial Sequence: Synthetic oligonucleotide
gaccuugugugggucgugg

SEQ ID NO: 3290489 - RNA, 19 nt, Artificial Sequence
  Description of Artificial Sequence: Synthetic oligonucleotide
agaccuugugugggucgug

SEQ ID NO: 3290490 - RNA, 19 nt, Artificial Sequence
  Description of Artificial Sequence: Synthetic oligonucleotide
uagaccuugugugggucgu

SEQ ID NO: 3290491 - RNA, 19 nt, Artificial Sequence
  Description of Artificial Sequence: Synthetic oligonucleotide
auagaccuugugugggucg

SEQ ID NO: 3290492 - RNA, 19 nt, Artificial Sequence
  Description of Artificial Sequence: Synthetic oligonucleotide
cauagaccuuguguggguc

SEQ ID NO: 3290493 - RNA, 19 nt, Artificial Sequence
  Description of Artificial Sequence: Synthetic oligonucleotide
aaacucauagaccuugugu

SEQ ID NO: 3290494 - RNA, 19 nt, Artificial Sequence
  Description of Artificial Sequence: Synthetic oligonucleotide
caaacucauagaccuugug

SEQ ID NO: 3290495 - RNA, 19 nt, Artificial Sequence
  Description of Artificial Sequence: Synthetic oligonucleotide
gaucacaaacucauagacc

SEQ ID NO: 3290496 - RNA, 19 nt, Artificial Sequence
  Description of Artificial Sequence: Synthetic oligonucleotide
agaucacaaacucauagac

SEQ ID NO: 3290497 - RNA, 19 nt, Artificial Sequence
  Description of Artificial Sequence: Synthetic oligonucleotide
gagaucacaaacucauaga

SEQ ID NO: 3290498 - RNA, 19 nt, Artificial Sequence
  Description of Artificial Sequence: Synthetic oligonucleotide
ugagaucacaaacucauag

SEQ ID NO: 3290499 - RNA, 19 nt, Artificial Sequence
  Description of Artificial Sequence: Synthetic oligonucleotide
cugagaucacaaacucaua

SEQ ID NO: 3290500 - RNA, 19 nt, Artificial Sequence
  Description of Artificial Sequence: Synthetic oligonucleotide
uccugagaucacaaacuca

SEQ ID NO: 3290501 - RNA, 19 nt, Artificial Sequence
  Description of Artificial Sequence: Synthetic oligonucleotide
cuccugagaucacaaacuc

SEQ ID NO: 3290502 - RNA, 19 nt, Artificial Sequence
  Description of Artificial Sequence: Synthetic oligonucleotide
agcuccugagaucacaaac

SEQ ID NO: 3290503 - RNA, 19 nt, Artificial Sequence
  Description of Artificial Sequence: Synthetic oligonucleotide
uucccagcuccugagauca

SEQ ID NO: 3290504 - RNA, 19 nt, Artificial Sequence
  Description of Artificial Sequence: Synthetic oligonucleotide
aguucccagcuccugagau

SEQ ID NO: 3290505 - RNA, 19 nt, Artificial Sequence
  Description of Artificial Sequence: Synthetic oligonucleotide
caaguucccagcuccugag

SEQ ID NO: 3290506 - RNA, 19 nt, Artificial Sequence
  Description of Artificial Sequence: Synthetic oligonucleotide
gcaaguucccagcuccuga

SEQ ID NO: 3290507 - RNA, 19 nt, Artificial Sequence
  Description of Artificial Sequence: Synthetic oligonucleotide
ggcaaguucccagcuccug

SEQ ID NO: 3290508 - RNA, 19 nt, Artificial Sequence
  Description of Artificial Sequence: Synthetic oligonucleotide
aggcaaguucccagcuccu

SEQ ID NO: 3290509 - RNA, 19 nt, Artificial Sequence
  Description of Artificial Sequence: Synthetic oligonucleotide
cucaggcaaguucccagcu

SEQ ID NO: 3290510 - RNA, 19 nt, Artificial Sequence
  Description of Artificial Sequence: Synthetic oligonucleotide
aacucaggcaaguucccag

SEQ ID NO: 3290511 - RNA, 19 nt, Artificial Sequence
  Description of Artificial Sequence: Synthetic oligonucleotide
caacucaggcaaguuccca

SEQ ID NO: 3290512 - RNA, 19 nt, Artificial Sequence
  Description of Artificial Sequence: Synthetic oligonucleotide
uguccaacucaggcaaguu

SEQ ID NO: 3290513 - RNA, 19 nt, Artificial Sequence
  Description of Artificial Sequence: Synthetic oligonucleotide
gguguccaacucaggcaag

SEQ ID NO: 3290514 - RNA, 19 nt, Artificial Sequence
  Description of Artificial Sequence: Synthetic oligonucleotide
aagguguccaacucaggca

SEQ ID NO: 3290515 - RNA, 19 nt, Artificial Sequence
  Description of Artificial Sequence: Synthetic oligonucleotide
aaagguguccaacucaggc

SEQ ID NO: 3290516 - RNA, 19 nt, Artificial Sequence
  Description of Artificial Sequence: Synthetic oligonucleotide
ggaaagguguccaacucag

SEQ ID NO: 3290517 - RNA, 19 nt, Artificial Sequence
  Description of Artificial Sequence: Synthetic oligonucleotide
cuguaucucccauuggugu

SEQ ID NO: 3290518 - RNA, 19 nt, Artificial Sequence
  Description of Artificial Sequence: Synthetic oligonucleotide
guacuguaucucccauugg

SEQ ID NO: 3290519 - RNA, 19 nt, Artificial Sequence
  Description of Artificial Sequence: Synthetic oligonucleotide
gagguacuguaucucccau

SEQ ID NO: 3290520 - RNA, 19 nt, Artificial Sequence
  Description of Artificial Sequence: Synthetic oligonucleotide
cgagguacuguaucuccca

SEQ ID NO: 3290521 - RNA, 19 nt, Artificial Sequence
  Description of Artificial Sequence: Synthetic oligonucleotide
ccgagguacuguaucuccc

SEQ ID NO: 3290522 - RNA, 19 nt, Artificial Sequence
  Description of Artificial Sequence: Synthetic oligonucleotide
uccgagguacuguaucucc

SEQ ID NO: 3290523 - RNA, 19 nt, Artificial Sequence
  Description of Artificial Sequence: Synthetic oligonucleotide
auccgagguacuguaucuc

SEQ ID NO: 3290524 - RNA, 19 nt, Artificial Sequence
  Description of Artificial Sequence: Synthetic oligonucleotide
uauccgagguacuguaucu

SEQ ID NO: 3290525 - RNA, 19 nt, Artificial Sequence
  Description of Artificial Sequence: Synthetic oligonucleotide
guauccgagguacuguauc

SEQ ID NO: 3290526 - RNA, 19 nt, Artificial Sequence
  Description of Artificial Sequence: Synthetic oligonucleotide
gguauccgagguacuguau

SEQ ID NO: 3290527 - RNA, 19 nt, Artificial Sequence
  Description of Artificial Sequence: Synthetic oligonucleotide
ggguauccgagguacugua

SEQ ID NO: 3290528 - RNA, 19 nt, Artificial Sequence
  Description of Artificial Sequence: Synthetic oligonucleotide
aaugugucuuccuggguau

SEQ ID NO: 3290529 - RNA, 19 nt, Artificial Sequence
  Description of Artificial Sequence: Synthetic oligonucleotide
ucuaaugugucuuccuggg

SEQ ID NO: 3290530 - RNA, 19 nt, Artificial Sequence
  Description of Artificial Sequence: Synthetic oligonucleotide
ccucuaaugugucuuccug

SEQ ID NO: 3290531 - RNA, 19 nt, Artificial Sequence
  Description of Artificial Sequence: Synthetic oligonucleotide
guaacuccucuaauguguc

SEQ ID NO: 3290532 - RNA, 19 nt, Artificial Sequence
  Description of Artificial Sequence: Synthetic oligonucleotide
aguaacuccucuaaugugu

SEQ ID NO: 3290533 - RNA, 19 nt, Artificial Sequence
  Description of Artificial Sequence: Synthetic oligonucleotide
caguaacuccucuaaugug

SEQ ID NO: 3290534 - RNA, 19 nt, Artificial Sequence
  Description of Artificial Sequence: Synthetic oligonucleotide
cccaguaacuccucuaaug

SEQ ID NO: 3290535 - RNA, 19 nt, Artificial Sequence
  Description of Artificial Sequence: Synthetic oligonucleotide
gaccaugucacccaguaac

SEQ ID NO: 3290536 - RNA, 19 nt, Artificial Sequence
  Description of Artificial Sequence: Synthetic oligonucleotide
agaccaugucacccaguaa

SEQ ID NO: 3290537 - RNA, 19 nt, Artificial Sequence
  Description of Artificial Sequence: Synthetic oligonucleotide
aagaccaugucacccagua

SEQ ID NO: 3290538 - RNA, 19 nt, Artificial Sequence
  Description of Artificial Sequence: Synthetic oligonucleotide
caagaccaugucacccagu

SEQ ID NO: 3290539 - RNA, 19 nt, Artificial Sequence
  Description of Artificial Sequence: Synthetic oligonucleotide
ucaagaccaugucacccag

SEQ ID NO: 3290540 - RNA, 19 nt, Artificial Sequence
  Description of Artificial Sequence: Synthetic oligonucleotide
gucaagaccaugucaccca

SEQ ID NO: 3290541 - RNA, 19 nt, Artificial Sequence
  Description of Artificial Sequence: Synthetic oligonucleotide
ggucaagaccaugucaccc

SEQ ID NO: 3290542 - RNA, 19 nt, Artificial Sequence
  Description of Artificial Sequence: Synthetic oligonucleotide
ggggucaagaccaugucac

SEQ ID NO: 3290543 - RNA, 19 nt, Artificial Sequence
  Description of Artificial Sequence: Synthetic oligonucleotide
uggggucaagaccauguca

SEQ ID NO: 3290544 - RNA, 19 nt, Artificial Sequence
  Description of Artificial Sequence: Synthetic oligonucleotide
auggggucaagaccauguc

SEQ ID NO: 3290545 - RNA, 19 nt, Artificial Sequence
  Description of Artificial Sequence: Synthetic oligonucleotide
aauggggucaagaccaugu

SEQ ID NO: 3290546 - RNA, 19 nt, Artificial Sequence
  Description of Artificial Sequence: Synthetic oligonucleotide
gaauggggucaagaccaug

SEQ ID NO: 3290547 - RNA, 19 nt, Artificial Sequence
  Description of Artificial Sequence: Synthetic oligonucleotide
ggaauggggucaagaccau

SEQ ID NO: 3290548 - RNA, 19 nt, Artificial Sequence
  Description of Artificial Sequence: Synthetic oligonucleotide
ggccccucaucugggaaug

SEQ ID NO: 3290549 - RNA, 19 nt, Artificial Sequence
  Description of Artificial Sequence: Synthetic oligonucleotide
gggccccucaucugggaau

SEQ ID NO: 3290550 - RNA, 19 nt, Artificial Sequence
  Description of Artificial Sequence: Synthetic oligonucleotide
uguucugggaccaccacca

SEQ ID NO: 3290551 - RNA, 19 nt, Artificial Sequence
  Description of Artificial Sequence: Synthetic oligonucleotide
aggcgucuguucugggacc

SEQ ID NO: 3290552 - RNA, 19 nt, Artificial Sequence
  Description of Artificial Sequence: Synthetic oligonucleotide
gaggcgucuguucugggac

SEQ ID NO: 3290553 - RNA, 19 nt, Artificial Sequence
  Description of Artificial Sequence: Synthetic oligonucleotide
ggaggcgucuguucuggga

SEQ ID NO: 3290554 - RNA, 19 nt, Artificial Sequence
  Description of Artificial Sequence: Synthetic oligonucleotide
uggaggcgucuguucuggg

SEQ ID NO: 3290555 - RNA, 19 nt, Artificial Sequence
  Description of Artificial Sequence: Synthetic oligonucleotide
guggaggcgucuguucugg

SEQ ID NO: 3290556 - RNA, 19 nt, Artificial Sequence
  Description of Artificial Sequence: Synthetic oligonucleotide
agaguggaggcgucuguuc

SEQ ID NO: 3290557 - RNA, 19 nt, Artificial Sequence
  Description of Artificial Sequence: Synthetic oligonucleotide
agcaagaguggaggcgucu

SEQ ID NO: 3290558 - RNA, 19 nt, Artificial Sequence
  Description of Artificial Sequence: Synthetic oligonucleotide
gggcucagcaagaguggag

SEQ ID NO: 3290559 - RNA, 19 nt, Artificial Sequence
  Description of Artificial Sequence: Synthetic oligonucleotide
gguggggcucagcaagagu

SEQ ID NO: 3290560 - RNA, 19 nt, Artificial Sequence
  Description of Artificial Sequence: Synthetic oligonucleotide
ugguggggcucagcaagag

SEQ ID NO: 3290561 - RNA, 19 nt, Artificial Sequence
  Description of Artificial Sequence: Synthetic oligonucleotide
ggucuaugguggggcucag

SEQ ID NO: 3290562 - RNA, 19 nt, Artificial Sequence
  Description of Artificial Sequence: Synthetic oligonucleotide
gaggucuaugguggggcuc

SEQ ID NO: 3290563 - RNA, 19 nt, Artificial Sequence
  Description of Artificial Sequence: Synthetic oligonucleotide
gagcggggaggucuauggu

SEQ ID NO: 3290564 - RNA, 19 nt, Artificial Sequence
  Description of Artificial Sequence: Synthetic oligonucleotide
cuucagcggguuuucaggg

SEQ ID NO: 3290565 - RNA, 19 nt, Artificial Sequence
  Description of Artificial Sequence: Synthetic oligonucleotide
gcuucagcggguuuucagg

SEQ ID NO: 3290566 - RNA, 19 nt, Artificial Sequence
  Description of Artificial Sequence: Synthetic oligonucleotide
aagagccgcuucagcgggu

SEQ ID NO: 3290567 - RNA, 19 nt, Artificial Sequence
  Description of Artificial Sequence: Synthetic oligonucleotide
aggcaccaagagccgcuuc

SEQ ID NO: 3290568 - RNA, 19 nt, Artificial Sequence
  Description of Artificial Sequence: Synthetic oligonucleotide
cgaacucccacucuucauc

SEQ ID NO: 3290569 - RNA, 19 nt, Artificial Sequence
  Description of Artificial Sequence: Synthetic oligonucleotide
ucgaacucccacucuucau

SEQ ID NO: 3290570 - RNA, 19 nt, Artificial Sequence
  Description of Artificial Sequence: Synthetic oligonucleotide
gucaccucgaacucccacu

SEQ ID NO: 3290571 - RNA, 19 nt, Artificial Sequence
  Description of Artificial Sequence: Synthetic oligonucleotide
agucaccucgaacucccac

SEQ ID NO: 3290572 - RNA, 19 nt, Artificial Sequence
  Description of Artificial Sequence: Synthetic oligonucleotide
cagucaccucgaacuccca

SEQ ID NO: 3290573 - RNA, 19 nt, Artificial Sequence
  Description of Artificial Sequence: Synthetic oligonucleotide
aaggcagucaccucgaacu

SEQ ID NO: 3290574 - RNA, 19 nt, Artificial Sequence
  Description of Artificial Sequence: Synthetic oligonucleotide
gaaggcagucaccucgaac

SEQ ID NO: 3290575 - RNA, 19 nt, Artificial Sequence
  Description of Artificial Sequence: Synthetic oligonucleotide
uagaaggcagucaccucga

SEQ ID NO: 3290576 - RNA, 19 nt, Artificial Sequence
  Description of Artificial Sequence: Synthetic oligonucleotide
cgauagaaggcagucaccu

SEQ ID NO: 3290577 - RNA, 19 nt, Artificial Sequence
  Description of Artificial Sequence: Synthetic oligonucleotide
ccgauagaaggcagucacc

SEQ ID NO: 3290578 - RNA, 19 nt, Artificial Sequence
  Description of Artificial Sequence: Synthetic oligonucleotide
cccgauagaaggcagucac

SEQ ID NO: 3290579 - RNA, 19 nt, Artificial Sequence
  Description of Artificial Sequence: Synthetic oligonucleotide
ccccgauagaaggcaguca

SEQ ID NO: 3290580 - RNA, 19 nt, Artificial Sequence
  Description of Artificial Sequence: Synthetic oligonucleotide
gccccgauagaaggcaguc

SEQ ID NO: 3290581 - RNA, 19 nt, Artificial Sequence
  Description of Artificial Sequence: Synthetic oligonucleotide
ggccccgauagaaggcagu

SEQ ID NO: 3290582 - RNA, 19 nt, Artificial Sequence
  Description of Artificial Sequence: Synthetic oligonucleotide
cuuggcggccccgauagaa

SEQ ID NO: 3290583 - RNA, 19 nt, Artificial Sequence
  Description of Artificial Sequence: Synthetic oligonucleotide
acuuggcggccccgauaga

SEQ ID NO: 3290584 - RNA, 19 nt, Artificial Sequence
  Description of Artificial Sequence: Synthetic oligonucleotide
aagacuuggcggccccgau

SEQ ID NO: 3290585 - RNA, 19 nt, Artificial Sequence
  Description of Artificial Sequence: Synthetic oligonucleotide
gacugucugcuggaagacu

SEQ ID NO: 3290586 - RNA, 19 nt, Artificial Sequence
  Description of Artificial Sequence: Synthetic oligonucleotide
cagcaucguguccccuccu

SEQ ID NO: 3290587 - RNA, 19 nt, Artificial Sequence
  Description of Artificial Sequence: Synthetic oligonucleotide
uauuggcuguccaggcagc

SEQ ID NO: 3290588 - RNA, 19 nt, Artificial Sequence
  Description of Artificial Sequence: Synthetic oligonucleotide
uuauuggcuguccaggcag

SEQ ID NO: 3290589 - RNA, 19 nt, Artificial Sequence
  Description of Artificial Sequence: Synthetic oligonucleotide
auuauuggcuguccaggca

SEQ ID NO: 3290590 - RNA, 19 nt, Artificial Sequence
  Description of Artificial Sequence: Synthetic oligonucleotide
uauuauuggcuguccaggc

SEQ ID NO: 3290591 - RNA, 19 nt, Artificial Sequence
  Description of Artificial Sequence: Synthetic oligonucleotide
guauuauuggcuguccagg

SEQ ID NO: 3290592 - RNA, 19 nt, Artificial Sequence
  Description of Artificial Sequence: Synthetic oligonucleotide
uggcaguauuauuggcugu

SEQ ID NO: 3290593 - RNA, 19 nt, Artificial Sequence
  Description of Artificial Sequence: Synthetic oligonucleotide
cuggcaguauuauuggcug

SEQ ID NO: 3290594 - RNA, 19 nt, Artificial Sequence
  Description of Artificial Sequence: Synthetic oligonucleotide
ggucuggcaguauuauugg

SEQ ID NO: 3290595 - RNA, 19 nt, Artificial Sequence
  Description of Artificial Sequence: Synthetic oligonucleotide
ccggggucuggcaguauua

SEQ ID NO: 3290596 - RNA, 19 nt, Artificial Sequence
  Description of Artificial Sequence: Synthetic oligonucleotide
cccggggucuggcaguauu

SEQ ID NO: 3290597 - RNA, 19 nt, Artificial Sequence
  Description of Artificial Sequence: Synthetic oligonucleotide
cuguuaccaacaccccggg

SEQ ID NO: 3290598 - RNA, 19 nt, Artificial Sequence
  Description of Artificial Sequence: Synthetic oligonucleotide
ucuguuaccaacaccccgg

SEQ ID NO: 3290599 - RNA, 19 nt, Artificial Sequence
  Description of Artificial Sequence: Synthetic oligonucleotide
gucuguuaccaacaccccg

SEQ ID NO: 3290600 - RNA, 19 nt, Artificial Sequence
  Description of Artificial Sequence: Synthetic oligonucleotide
ugucuguuaccaacacccc

SEQ ID NO: 3290601 - RNA, 19 nt, Artificial Sequence
  Description of Artificial Sequence: Synthetic oligonucleotide
cuugucuguuaccaacacc

SEQ ID NO: 3290602 - RNA, 19 nt, Artificial Sequence
  Description of Artificial Sequence: Synthetic oligonucleotide
cacggucuugucuguuacc

SEQ ID NO: 3290603 - RNA, 19 nt, Artificial Sequence
  Description of Artificial Sequence: Synthetic oligonucleotide
caucacggucuugucuguu

SEQ ID NO: 3290604 - RNA, 19 nt, Artificial Sequence
  Description of Artificial Sequence: Synthetic oligonucleotide
gcccaucacggucuugucu

SEQ ID NO: 3290605 - RNA, 19 nt, Artificial Sequence
  Description of Artificial Sequence: Synthetic oligonucleotide
cacguagcccaucacgguc

SEQ ID NO: 3290606 - RNA, 19 nt, Artificial Sequence
  Description of Artificial Sequence: Synthetic oligonucleotide
cgccucacguagcccauca

SEQ ID NO: 3290607 - RNA, 19 nt, Artificial Sequence
  Description of Artificial Sequence: Synthetic oligonucleotide
acgccucacguagcccauc

SEQ ID NO: 3290608 - RNA, 19 nt, Artificial Sequence
  Description of Artificial Sequence: Synthetic oligonucleotide
uacacgccucacguagccc

SEQ ID NO: 3290609 - RNA, 19 nt, Artificial Sequence
  Description of Artificial Sequence: Synthetic oligonucleotide
guacacgccucacguagcc

SEQ ID NO: 3290610 - RNA, 19 nt, Artificial Sequence
  Description of Artificial Sequence: Synthetic oligonucleotide
caguacacgccucacguag

SEQ ID NO: 3290611 - RNA, 19 nt, Artificial Sequence
  Description of Artificial Sequence: Synthetic oligonucleotide
ucaguacacgccucacgua

SEQ ID NO: 3290612 - RNA, 19 nt, Artificial Sequence
  Description of Artificial Sequence: Synthetic oligonucleotide
cucaguacacgccucacgu

SEQ ID NO: 3290613 - RNA, 19 nt, Artificial Sequence
  Description of Artificial Sequence: Synthetic oligonucleotide
gcucaguacacgccucacg

SEQ ID NO: 3290614 - RNA, 19 nt, Artificial Sequence
  Description of Artificial Sequence: Synthetic oligonucleotide
agcucaguacacgccucac

SEQ ID NO: 3290615 - RNA, 19 nt, Artificial Sequence
  Description of Artificial Sequence: Synthetic oligonucleotide
cagcucaguacacgccuca

SEQ ID NO: 3290616 - RNA, 19 nt, Artificial Sequence
  Description of Artificial Sequence: Synthetic oligonucleotide
agcagcucaguacacgccu

SEQ ID NO: 3290617 - RNA, 19 nt, Artificial Sequence
  Description of Artificial Sequence: Synthetic oligonucleotide
aagcagcucaguacacgcc

SEQ ID NO: 3290618 - RNA, 19 nt, Artificial Sequence
  Description of Artificial Sequence: Synthetic oligonucleotide
ccaagcagcucaguacacg

SEQ ID NO: 3290619 - RNA, 19 nt, Artificial Sequence
  Description of Artificial Sequence: Synthetic oligonucleotide
acccaagcagcucaguaca

SEQ ID NO: 3290620 - RNA, 19 nt, Artificial Sequence
  Description of Artificial Sequence: Synthetic oligonucleotide
cacccaagcagcucaguac

SEQ ID NO: 3290621 - RNA, 19 nt, Artificial Sequence
  Description of Artificial Sequence: Synthetic oligonucleotide
cccacccaagcagcucagu

SEQ ID NO: 3290622 - RNA, 19 nt, Artificial Sequence
  Description of Artificial Sequence: Synthetic oligonucleotide
ccuccacagagcuaguccc

SEQ ID NO: 3290623 - RNA, 19 nt, Artificial Sequence
  Description of Artificial Sequence: Synthetic oligonucleotide
ugcccuccacagagcuagu

SEQ ID NO: 3290624 - RNA, 19 nt, Artificial Sequence
  Description of Artificial Sequence: Synthetic oligonucleotide
cugcccuccacagagcuag

SEQ ID NO: 3290625 - RNA, 19 nt, Artificial Sequence
  Description of Artificial Sequence: Synthetic oligonucleotide
auguguggcagugccccag

SEQ ID NO: 3290626 - RNA, 19 nt, Artificial Sequence
  Description of Artificial Sequence: Synthetic oligonucleotide
uauguguggcagugcccca

SEQ ID NO: 3290627 - RNA, 19 nt, Artificial Sequence
  Description of Artificial Sequence: Synthetic oligonucleotide
guauguguggcagugcccc

SEQ ID NO: 3290628 - RNA, 19 nt, Artificial Sequence
  Description of Artificial Sequence: Synthetic oligonucleotide
caguauguguggcagugcc

SEQ ID NO: 3290629 - RNA, 19 nt, Artificial Sequence
  Description of Artificial Sequence: Synthetic oligonucleotide
ccaguauguguggcagugc

SEQ ID NO: 3290630 - RNA, 19 nt, Artificial Sequence
  Description of Artificial Sequence: Synthetic oligonucleotide
gcccaguauguguggcagu

SEQ ID NO: 3290631 - RNA, 19 nt, Artificial Sequence
  Description of Artificial Sequence: Synthetic oligonucleotide
ggcccaguauguguggcag

SEQ ID NO: 3290632 - RNA, 19 nt, Artificial Sequence
  Description of Artificial Sequence: Synthetic oligonucleotide
gggcccaguauguguggca

SEQ ID NO: 3290633 - RNA, 19 nt, Artificial Sequence
  Description of Artificial Sequence: Synthetic oligonucleotide
cugcugucagggagaagcu

SEQ ID NO: 3290634 - RNA, 19 nt, Artificial Sequence
  Description of Artificial Sequence: Synthetic oligonucleotide
gggacugcugucagggaga

SEQ ID NO: 3290635 - RNA, 19 nt, Artificial Sequence
  Description of Artificial Sequence: Synthetic oligonucleotide
ucgaacaggucuccaucuu

SEQ ID NO: 3290636 - RNA, 19 nt, Artificial Sequence
  Description of Artificial Sequence: Synthetic oligonucleotide
aggucgaacaggucuccau

SEQ ID NO: 3290637 - RNA, 19 nt, Artificial Sequence
  Description of Artificial Sequence: Synthetic oligonucleotide
caggucgaacaggucucca

SEQ ID NO: 3290638 - RNA, 19 nt, Artificial Sequence
  Description of Artificial Sequence: Synthetic oligonucleotide
ucaggucgaacaggucucc

SEQ ID NO: 3290639 - RNA, 19 nt, Artificial Sequence
  Description of Artificial Sequence: Synthetic oligonucleotide
gccucaggucgaacagguc

SEQ ID NO: 3290640 - RNA, 19 nt, Artificial Sequence
  Description of Artificial Sequence: Synthetic oligonucleotide
ggccucaggucgaacaggu

SEQ ID NO: 3290641 - RNA, 19 nt, Artificial Sequence
  Description of Artificial Sequence: Synthetic oligonucleotide
aagggccucaggucgaaca

SEQ ID NO: 3290642 - RNA, 19 nt, Artificial Sequence
  Description of Artificial Sequence: Synthetic oligonucleotide
ugacacgaagggccucagg

SEQ ID NO: 3290643 - RNA, 19 nt, Artificial Sequence
  Description of Artificial Sequence: Synthetic oligonucleotide
gaucugacacgaagggccu

SEQ ID NO: 3290644 - RNA, 19 nt, Artificial Sequence
  Description of Artificial Sequence: Synthetic oligonucleotide
ucagaucugacacgaaggg

SEQ ID NO: 3290645 - RNA, 19 nt, Artificial Sequence
  Description of Artificial Sequence: Synthetic oligonucleotide
aucagaucugacacgaagg

SEQ ID NO: 3290646 - RNA, 19 nt, Artificial Sequence
  Description of Artificial Sequence: Synthetic oligonucleotide
caaucagaucugacacgaa

SEQ ID NO: 3290647 - RNA, 19 nt, Artificial Sequence
  Description of Artificial Sequence: Synthetic oligonucleotide
gcaaucagaucugacacga

SEQ ID NO: 3290648 - RNA, 19 nt, Artificial Sequence
  Description of Artificial Sequence: Synthetic oligonucleotide
gaaggcaaucagaucugac

SEQ ID NO: 3290649 - RNA, 19 nt, Artificial Sequence
  Description of Artificial Sequence: Synthetic oligonucleotide
augaaggcaaucagaucug

SEQ ID NO: 3290650 - RNA, 19 nt, Artificial Sequence
  Description of Artificial Sequence: Synthetic oligonucleotide
ugaugaaggcaaucagauc

SEQ ID NO: 3290651 - RNA, 19 nt, Artificial Sequence
  Description of Artificial Sequence: Synthetic oligonucleotide
uugaugaaggcaaucagau

SEQ ID NO: 3290652 - RNA, 19 nt, Artificial Sequence
  Description of Artificial Sequence: Synthetic oligonucleotide
ucggcuuccuuugaugaag

SEQ ID NO: 3290653 - RNA, 19 nt, Artificial Sequence
  Description of Artificial Sequence: Synthetic oligonucleotide
gucggcuuccuuugaugaa

SEQ ID NO: 3290654 - RNA, 19 nt, Artificial Sequence
  Description of Artificial Sequence: Synthetic oligonucleotide
ugucggcuuccuuugauga

SEQ ID NO: 3290655 - RNA, 19 nt, Artificial Sequence
  Description of Artificial Sequence: Synthetic oligonucleotide
gugucggcuuccuuugaug

SEQ ID NO: 3290656 - RNA, 19 nt, Artificial Sequence
  Description of Artificial Sequence: Synthetic oligonucleotide
agugucggcuuccuuugau

SEQ ID NO: 3290657 - RNA, 19 nt, Artificial Sequence
  Description of Artificial Sequence: Synthetic oligonucleotide
gugagugucggcuuccuuu

SEQ ID NO: 3290658 - RNA, 19 nt, Artificial Sequence
  Description of Artificial Sequence: Synthetic oligonucleotide
ggugagugucggcuuccuu

SEQ ID NO: 3290659 - RNA, 19 nt, Artificial Sequence
  Description of Artificial Sequence: Synthetic oligonucleotide
uggugagugucggcuuccu

SEQ ID NO: 3290660 - RNA, 19 nt, Artificial Sequence
  Description of Artificial Sequence: Synthetic oligonucleotide
gcguggugagugucggcuu

SEQ ID NO: 3290661 - RNA, 19 nt, Artificial Sequence
  Description of Artificial Sequence: Synthetic oligonucleotide
agcguggugagugucggcu

SEQ ID NO: 3290662 - RNA, 19 nt, Artificial Sequence
  Description of Artificial Sequence: Synthetic oligonucleotide
uagcguggugagugucggc

SEQ ID NO: 3290663 - RNA, 19 nt, Artificial Sequence
  Description of Artificial Sequence: Synthetic oligonucleotide
guagcguggugagugucgg

SEQ ID NO: 3290664 - RNA, 19 nt, Artificial Sequence
  Description of Artificial Sequence: Synthetic oligonucleotide
gguguagcguggugagugu

SEQ ID NO: 3290665 - RNA, 19 nt, Artificial Sequence
  Description of Artificial Sequence: Synthetic oligonucleotide
ggguguagcguggugagug

SEQ ID NO: 3290666 - RNA, 19 nt, Artificial Sequence
  Description of Artificial Sequence: Synthetic oligonucleotide
gaggguguagcguggugag

SEQ ID NO: 3290667 - RNA, 19 nt, Artificial Sequence
  Description of Artificial Sequence: Synthetic oligonucleotide
ccagaggguguagcguggu

SEQ ID NO: 3290668 - RNA, 19 nt, Artificial Sequence
  Description of Artificial Sequence: Synthetic oligonucleotide
aaccagaggguguagcgug

SEQ ID NO: 3290669 - RNA, 19 nt, Artificial Sequence
  Description of Artificial Sequence: Synthetic oligonucleotide
gaaccagaggguguagcgu

SEQ ID NO: 3290670 - RNA, 19 nt, Artificial Sequence
  Description of Artificial Sequence: Synthetic oligonucleotide
cagaaccagaggguguagc

SEQ ID NO: 3290671 - RNA, 19 nt, Artificial Sequence
  Description of Artificial Sequence: Synthetic oligonucleotide
acagaaccagaggguguag

SEQ ID NO: 3290672 - RNA, 19 nt, Artificial Sequence
  Description of Artificial Sequence: Synthetic oligonucleotide
ugguccacggcuggucuug

SEQ ID NO: 3290673 - RNA, 19 nt, Artificial Sequence
  Description of Artificial Sequence: Synthetic oligonucleotide
uugguccacggcuggucuu

SEQ ID NO: 3290674 - RNA, 19 nt, Artificial Sequence
  Description of Artificial Sequence: Synthetic oligonucleotide
cuugguccacggcuggucu

SEQ ID NO: 3290675 - RNA, 19 nt, Artificial Sequence
  Description of Artificial Sequence: Synthetic oligonucleotide
gaacaaccuugagcaucac

SEQ ID NO: 3290676 - RNA, 19 nt, Artificial Sequence
  Description of Artificial Sequence: Synthetic oligonucleotide
ggaacaaccuugagcauca

SEQ ID NO: 3290677 - RNA, 19 nt, Artificial Sequence
  Description of Artificial Sequence: Synthetic oligonucleotide
gggaacaaccuugagcauc

SEQ ID NO: 3290678 - RNA, 19 nt, Artificial Sequence
  Description of Artificial Sequence: Synthetic oligonucleotide
ugggaacaaccuugagcau

SEQ ID NO: 3290679 - RNA, 19 nt, Artificial Sequence
  Description of Artificial Sequence: Synthetic oligonucleotide
gugggaacaaccuugagca

SEQ ID NO: 3290680 - RNA, 19 nt, Artificial Sequence
  Description of Artificial Sequence: Synthetic oligonucleotide
cgugggaacaaccuugagc

SEQ ID NO: 3290681 - RNA, 19 nt, Artificial Sequence
  Description of Artificial Sequence: Synthetic oligonucleotide
cacgugggaacaaccuuga

SEQ ID NO: 3290682 - RNA, 19 nt, Artificial Sequence
  Description of Artificial Sequence: Synthetic oligonucleotide
ggcacgugggaacaaccuu

SEQ ID NO: 3290683 - RNA, 19 nt, Artificial Sequence
  Description of Artificial Sequence: Synthetic oligonucleotide
aggcacgugggaacaaccu

SEQ ID NO: 3290684 - RNA, 19 nt, Artificial Sequence
  Description of Artificial Sequence: Synthetic oligonucleotide
aaggcacgugggaacaacc

SEQ ID NO: 3290685 - RNA, 19 nt, Artificial Sequence
  Description of Artificial Sequence: Synthetic oligonucleotide
uaaggcacgugggaacaac

SEQ ID NO: 3290686 - RNA, 19 nt, Artificial Sequence
  Description of Artificial Sequence: Synthetic oligonucleotide
cuaaggcacgugggaacaa

SEQ ID NO: 3290687 - RNA, 19 nt, Artificial Sequence
  Description of Artificial Sequence: Synthetic oligonucleotide
ccuaaggcacgugggaaca

SEQ ID NO: 3290688 - RNA, 19 nt, Artificial Sequence
  Description of Artificial Sequence: Synthetic oligonucleotide
cccuaaggcacgugggaac

SEQ ID NO: 3290689 - RNA, 19 nt, Artificial Sequence
  Description of Artificial Sequence: Synthetic oligonucleotide
gcccuaaggcacgugggaa

SEQ ID NO: 3290690 - RNA, 19 nt, Artificial Sequence
  Description of Artificial Sequence: Synthetic oligonucleotide
cauuuccagcagggcccua

SEQ ID NO: 3290691 - RNA, 19 nt, Artificial Sequence
  Description of Artificial Sequence: Synthetic oligonucleotide
ccauuuccagcagggcccu

SEQ ID NO: 3290692 - RNA, 19 nt, Artificial Sequence
  Description of Artificial Sequence: Synthetic oligonucleotide
ccgugccauuuccagcagg

SEQ ID NO: 3290693 - RNA, 19 nt, Artificial Sequence
  Description of Artificial Sequence: Synthetic oligonucleotide
aaccgugccauuuccagca

SEQ ID NO: 3290694 - RNA, 19 nt, Artificial Sequence
  Description of Artificial Sequence: Synthetic oligonucleotide
uaaccgugccauuuccagc

SEQ ID NO: 3290695 - RNA, 19 nt, Artificial Sequence
  Description of Artificial Sequence: Synthetic oligonucleotide
cuaaccgugccauuuccag

SEQ ID NO: 3290696 - RNA, 19 nt, Artificial Sequence
  Description of Artificial Sequence: Synthetic oligonucleotide
ucuaaccgugccauuucca

SEQ ID NO: 3290697 - RNA, 19 nt, Artificial Sequence
  Description of Artificial Sequence: Synthetic oligonucleotide
cucuaaccgugccauuucc

SEQ ID NO: 3290698 - RNA, 19 nt, Artificial Sequence
  Description of Artificial Sequence: Synthetic oligonucleotide
ccucuaaccgugccauuuc

SEQ ID NO: 3290699 - RNA, 19 nt, Artificial Sequence
  Description of Artificial Sequence: Synthetic oligonucleotide
gcccucuaaccgugccauu

SEQ ID NO: 3290700 - RNA, 19 nt, Artificial Sequence
  Description of Artificial Sequence: Synthetic oligonucleotide
cgcccucuaaccgugccau

SEQ ID NO: 3290701 - RNA, 19 nt, Artificial Sequence
  Description of Artificial Sequence: Synthetic oligonucleotide
ggaagcgcccucuaaccgu

SEQ ID NO: 3290702 - RNA, 19 nt, Artificial Sequence
  Description of Artificial Sequence: Synthetic oligonucleotide
aggaagcgcccucuaaccg

SEQ ID NO: 3290703 - RNA, 19 nt, Artificial Sequence
  Description of Artificial Sequence: Synthetic oligonucleotide
gaggaagcgcccucuaacc

SEQ ID NO: 3290704 - RNA, 19 nt, Artificial Sequence
  Description of Artificial Sequence: Synthetic oligonucleotide
gggaggaagcgcccucuaa

SEQ ID NO: 3290705 - RNA, 19 nt, Artificial Sequence
  Description of Artificial Sequence: Synthetic oligonucleotide
agggaggaagcgcccucua

SEQ ID NO: 3290706 - RNA, 19 nt, Artificial Sequence
  Description of Artificial Sequence: Synthetic oligonucleotide
augugcagguccacagugu

SEQ ID NO: 3290707 - RNA, 19 nt, Artificial Sequence
  Description of Artificial Sequence: Synthetic oligonucleotide
gaaaugugcagguccacag

SEQ ID NO: 3290708 - RNA, 19 nt, Artificial Sequence
  Description of Artificial Sequence: Synthetic oligonucleotide
uggaaaugugcagguccac

SEQ ID NO: 3290709 - RNA, 19 nt, Artificial Sequence
  Description of Artificial Sequence: Synthetic oligonucleotide
gcuguuggaaaugugcagg

SEQ ID NO: 3290710 - RNA, 19 nt, Artificial Sequence
  Description of Artificial Sequence: Synthetic oligonucleotide
guagcuguuggaaaugugc

SEQ ID NO: 3290711 - RNA, 19 nt, Artificial Sequence
  Description of Artificial Sequence: Synthetic oligonucleotide
gugaguggguagcuguugg

SEQ ID NO: 3290712 - RNA, 19 nt, Artificial Sequence
  Description of Artificial Sequence: Synthetic oligonucleotide
agugaguggguagcuguug

SEQ ID NO: 3290713 - RNA, 19 nt, Artificial Sequence
  Description of Artificial Sequence: Synthetic oligonucleotide
gagugaguggguagcuguu

SEQ ID NO: 3290714 - RNA, 19 nt, Artificial Sequence
  Description of Artificial Sequence: Synthetic oligonucleotide
agagugaguggguagcugu

SEQ ID NO: 3290715 - RNA, 19 nt, Artificial Sequence
  Description of Artificial Sequence: Synthetic oligonucleotide
gagagugaguggguagcug

SEQ ID NO: 3290716 - RNA, 19 nt, Artificial Sequence
  Description of Artificial Sequence: Synthetic oligonucleotide
ugagagugaguggguagcu

SEQ ID NO: 3290717 - RNA, 19 nt, Artificial Sequence
  Description of Artificial Sequence: Synthetic oligonucleotide
gaggugagagugagugggu

SEQ ID NO: 3290718 - RNA, 19 nt, Artificial Sequence
  Description of Artificial Sequence: Synthetic oligonucleotide
gguccgaggugagagugag

SEQ ID NO: 3290719 - RNA, 19 nt, Artificial Sequence
  Description of Artificial Sequence: Synthetic oligonucleotide
ugguccgaggugagaguga

SEQ ID NO: 3290720 - RNA, 19 nt, Artificial Sequence
  Description of Artificial Sequence: Synthetic oligonucleotide
cugguccgaggugagagug

SEQ ID NO: 3290721 - RNA, 19 nt, Artificial Sequence
  Description of Artificial Sequence: Synthetic oligonucleotide
acugguccgaggugagagu

SEQ ID NO: 3290722 - RNA, 19 nt, Artificial Sequence
  Description of Artificial Sequence: Synthetic oligonucleotide
guacugguccgaggugaga

SEQ ID NO: 3290723 - RNA, 19 nt, Artificial Sequence
  Description of Artificial Sequence: Synthetic oligonucleotide
uuguacugguccgagguga

SEQ ID NO: 3290724 - RNA, 19 nt, Artificial Sequence
  Description of Artificial Sequence: Synthetic oligonucleotide
cuuguacugguccgaggug

SEQ ID NO: 3290725 - RNA, 19 nt, Artificial Sequence
  Description of Artificial Sequence: Synthetic oligonucleotide
ccuuguacugguccgaggu

SEQ ID NO: 3290726 - RNA, 19 nt, Artificial Sequence
  Description of Artificial Sequence: Synthetic oligonucleotide
uacgccuuguacugguccg

SEQ ID NO: 3290727 - RNA, 19 nt, Artificial Sequence
  Description of Artificial Sequence: Synthetic oligonucleotide
guacgccuuguacuggucc

SEQ ID NO: 3290728 - RNA, 19 nt, Artificial Sequence
  Description of Artificial Sequence: Synthetic oligonucleotide
gagguacgccuuguacugg

SEQ ID NO: 3290729 - RNA, 19 nt, Artificial Sequence
  Description of Artificial Sequence: Synthetic oligonucleotide
ggagguacgccuuguacug

SEQ ID NO: 3290730 - RNA, 19 nt, Artificial Sequence
  Description of Artificial Sequence: Synthetic oligonucleotide
uggagguacgccuuguacu

SEQ ID NO: 3290731 - RNA, 19 nt, Artificial Sequence
  Description of Artificial Sequence: Synthetic oligonucleotide
cuggagguacgccuuguac

SEQ ID NO: 3290732 - RNA, 19 nt, Artificial Sequence
  Description of Artificial Sequence: Synthetic oligonucleotide
ccucaaccagguccuggag

SEQ ID NO: 3290733 - RNA, 19 nt, Artificial Sequence
  Description of Artificial Sequence: Synthetic oligonucleotide
gaaauccauguccucaacc

SEQ ID NO: 3290734 - RNA, 19 nt, Artificial Sequence
  Description of Artificial Sequence: Synthetic oligonucleotide
acccagaaauccauguccu

SEQ ID NO: 3290735 - RNA, 19 nt, Artificial Sequence
  Description of Artificial Sequence: Synthetic oligonucleotide
cagugacccagaaauccau

SEQ ID NO: 3290736 - RNA, 19 nt, Artificial Sequence
  Description of Artificial Sequence: Synthetic oligonucleotide
gucagaccuccccagugac

SEQ ID NO: 3290737 - RNA, 19 nt, Artificial Sequence
  Description of Artificial Sequence: Synthetic oligonucleotide
ggucagaccuccccaguga

SEQ ID NO: 3290738 - RNA, 19 nt, Artificial Sequence
  Description of Artificial Sequence: Synthetic oligonucleotide
acaagaaggcagcaccggu

SEQ ID NO: 3290739 - RNA, 19 nt, Artificial Sequence
  Description of Artificial Sequence: Synthetic oligonucleotide
cacaagaaggcagcaccgg

SEQ ID NO: 3290740 - RNA, 19 nt, Artificial Sequence
  Description of Artificial Sequence: Synthetic oligonucleotide
gcacaagaaggcagcaccg

SEQ ID NO: 3290741 - RNA, 19 nt, Artificial Sequence
  Description of Artificial Sequence: Synthetic oligonucleotide
gugaaggcacaagaaggca

SEQ ID NO: 3290742 - RNA, 19 nt, Artificial Sequence
  Description of Artificial Sequence: Synthetic oligonucleotide
ggugaaggcacaagaaggc

SEQ ID NO: 3290743 - RNA, 19 nt, Artificial Sequence
  Description of Artificial Sequence: Synthetic oligonucleotide
uauuggccagggugaaggc

SEQ ID NO: 3290744 - RNA, 19 nt, Artificial Sequence
  Description of Artificial Sequence: Synthetic oligonucleotide
uuauuggccagggugaagg

SEQ ID NO: 3290745 - RNA, 19 nt, Artificial Sequence
  Description of Artificial Sequence: Synthetic oligonucleotide
caguuuauuggccagggug

SEQ ID NO: 3290746 - RNA, 19 nt, Artificial Sequence
  Description of Artificial Sequence: Synthetic oligonucleotide
aacaguuuauuggccaggg

SEQ ID NO: 3290747 - RNA, 19 nt, Artificial Sequence
  Description of Artificial Sequence: Synthetic oligonucleotide
aaacaguuuauuggccagg

SEQ ID NO: 3290748 - RNA, 19 nt, Artificial Sequence
  Description of Artificial Sequence: Synthetic oligonucleotide
aagaaacaguuuauuggcc

SEQ ID NO: 3290749 - RNA, 19 nt, Artificial Sequence
  Description of Artificial Sequence: Synthetic oligonucleotide
uggcaagaaacaguuuauu

SEQ ID NO: 3290750 - RNA, 19 nt, Artificial Sequence
  Description of Artificial Sequence: Synthetic oligonucleotide
cccauaagagguggguguu

SEQ ID NO: 3290751 - RNA, 19 nt, Artificial Sequence
  Description of Artificial Sequence: Synthetic oligonucleotide
agguggguguucacccuua

SEQ ID NO: 3290752 - RNA, 19 nt, Artificial Sequence
  Description of Artificial Sequence: Synthetic oligonucleotide
gguggguguucacccuuaa

SEQ ID NO: 3290753 - RNA, 19 nt, Artificial Sequence
  Description of Artificial Sequence: Synthetic oligonucleotide
guggguguucacccuuaau

SEQ ID NO: 3290754 - RNA, 19 nt, Artificial Sequence
  Description of Artificial Sequence: Synthetic oligonucleotide
uggguguucacccuuaaua

SEQ ID NO: 3290755 - RNA, 19 nt, Artificial Sequence
  Description of Artificial Sequence: Synthetic oligonucleotide
ggguguucacccuuaauaa

SEQ ID NO: 3290756 - RNA, 19 nt, Artificial Sequence
  Description of Artificial Sequence: Synthetic oligonucleotide
aaacaaaauacgggagcuu

SEQ ID NO: 3290757 - RNA, 19 nt, Artificial Sequence
  Description of Artificial Sequence: Synthetic oligonucleotide
ggagcuuccaaucucccuu

SEQ ID NO: 3290758 - RNA, 19 nt, Artificial Sequence
  Description of Artificial Sequence: Synthetic oligonucleotide
uuuuguuugcggagaggaa

SEQ ID NO: 3290759 - RNA, 19 nt, Artificial Sequence
  Description of Artificial Sequence: Synthetic oligonucleotide
uuugcggagaggaagguuu

SEQ ID NO: 3290760 - RNA, 19 nt, Artificial Sequence
  Description of Artificial Sequence: Synthetic oligonucleotide
cggagaggaagguuuggaa

SEQ ID NO: 3290761 - RNA, 19 nt, Artificial Sequence
  Description of Artificial Sequence: Synthetic oligonucleotide
gaagguuuggaagagggua

SEQ ID NO: 3290762 - RNA, 19 nt, Artificial Sequence
  Description of Artificial Sequence: Synthetic oligonucleotide
gguuuggaagaggguagaa

SEQ ID NO: 3290763 - RNA, 19 nt, Artificial Sequence
  Description of Artificial Sequence: Synthetic oligonucleotide
cuccagggguuugcgaauu

SEQ ID NO: 3290764 - RNA, 19 nt, Artificial Sequence
  Description of Artificial Sequence: Synthetic oligonucleotide
uccagggguuugcgaauuu

SEQ ID NO: 3290765 - RNA, 19 nt, Artificial Sequence
  Description of Artificial Sequence: Synthetic oligonucleotide
ggguuugcgaauuuugcua

SEQ ID NO: 3290766 - RNA, 19 nt, Artificial Sequence
  Description of Artificial Sequence: Synthetic oligonucleotide
uugcgaauuuugcuaagaa

SEQ ID NO: 3290767 - RNA, 19 nt, Artificial Sequence
  Description of Artificial Sequence: Synthetic oligonucleotide
uuugcuaagaagcagacuu

SEQ ID NO: 3290768 - RNA, 19 nt, Artificial Sequence
  Description of Artificial Sequence: Synthetic oligonucleotide
uugcuaagaagcagacuuu

SEQ ID NO: 3290769 - RNA, 19 nt, Artificial Sequence
  Description of Artificial Sequence: Synthetic oligonucleotide
ugcuaagaagcagacuuuu

SEQ ID NO: 3290770 - RNA, 19 nt, Artificial Sequence
  Description of Artificial Sequence: Synthetic oligonucleotide
gcuaagaagcagacuuuua

SEQ ID NO: 3290771 - RNA, 19 nt, Artificial Sequence
  Description of Artificial Sequence: Synthetic oligonucleotide
cuaagaagcagacuuuuaa

SEQ ID NO: 3290772 - RNA, 19 nt, Artificial Sequence
  Description of Artificial Sequence: Synthetic oligonucleotide
agacuuuuaacaaggugaa

SEQ ID NO: 3290773 - RNA, 19 nt, Artificial Sequence
  Description of Artificial Sequence: Synthetic oligonucleotide
uuaacaaggugaaguggua

SEQ ID NO: 3290774 - RNA, 19 nt, Artificial Sequence
  Description of Artificial Sequence: Synthetic oligonucleotide
uaacaaggugaagugguau

SEQ ID NO: 3290775 - RNA, 19 nt, Artificial Sequence
  Description of Artificial Sequence: Synthetic oligonucleotide
aacaaggugaagugguauu

SEQ ID NO: 3290776 - RNA, 19 nt, Artificial Sequence
  Description of Artificial Sequence: Synthetic oligonucleotide
acaaggugaagugguauuu

SEQ ID NO: 3290777 - RNA, 19 nt, Artificial Sequence
  Description of Artificial Sequence: Synthetic oligonucleotide
gccacaucgagaaagcgaa

SEQ ID NO: 3290778 - RNA, 19 nt, Artificial Sequence
  Description of Artificial Sequence: Synthetic oligonucleotide
aucgagaaagcgaaaggaa

SEQ ID NO: 3290779 - RNA, 19 nt, Artificial Sequence
  Description of Artificial Sequence: Synthetic oligonucleotide
gaaccgaccagcagaauaa

SEQ ID NO: 3290780 - RNA, 19 nt, Artificial Sequence
  Description of Artificial Sequence: Synthetic oligonucleotide
cgaccagcagaauaaagaa

SEQ ID NO: 3290781 - RNA, 19 nt, Artificial Sequence
  Description of Artificial Sequence: Synthetic oligonucleotide
aauaaagaauacugcagua

SEQ ID NO: 3290782 - RNA, 19 nt, Artificial Sequence
  Description of Artificial Sequence: Synthetic oligonucleotide
auaaagaauacugcaguaa

SEQ ID NO: 3290783 - RNA, 19 nt, Artificial Sequence
  Description of Artificial Sequence: Synthetic oligonucleotide
uaaagaauacugcaguaaa

SEQ ID NO: 3290784 - RNA, 19 nt, Artificial Sequence
  Description of Artificial Sequence: Synthetic oligonucleotide
gcaguaaagaaggccacau

SEQ ID NO: 3290785 - RNA, 19 nt, Artificial Sequence
  Description of Artificial Sequence: Synthetic oligonucleotide
caguaaagaaggccacaua

SEQ ID NO: 3290786 - RNA, 19 nt, Artificial Sequence
  Description of Artificial Sequence: Synthetic oligonucleotide
uaaagaaggccacauacuu

SEQ ID NO: 3290787 - RNA, 19 nt, Artificial Sequence
  Description of Artificial Sequence: Synthetic oligonucleotide
aaagaaggccacauacuua

SEQ ID NO: 3290788 - RNA, 19 nt, Artificial Sequence
  Description of Artificial Sequence: Synthetic oligonucleotide
aagaaggccacauacuuau

SEQ ID NO: 3290789 - RNA, 19 nt, Artificial Sequence
  Description of Artificial Sequence: Synthetic oligonucleotide
cugucuacugcugugagua

SEQ ID NO: 3290790 - RNA, 19 nt, Artificial Sequence
  Description of Artificial Sequence: Synthetic oligonucleotide
acugcugugaguacccuuu

SEQ ID NO: 3290791 - RNA, 19 nt, Artificial Sequence
  Description of Artificial Sequence: Synthetic oligonucleotide
cugcugugaguacccuuuu

SEQ ID NO: 3290792 - RNA, 19 nt, Artificial Sequence
  Description of Artificial Sequence: Synthetic oligonucleotide
ugacuguagccgagcaguu

SEQ ID NO: 3290793 - RNA, 19 nt, Artificial Sequence
  Description of Artificial Sequence: Synthetic oligonucleotide
agcaguucccuguaacgua

SEQ ID NO: 3290794 - RNA, 19 nt, Artificial Sequence
  Description of Artificial Sequence: Synthetic oligonucleotide
ccuguaacguaugugagaa

SEQ ID NO: 3290795 - RNA, 19 nt, Artificial Sequence
  Description of Artificial Sequence: Synthetic oligonucleotide
guaacguaugugagaaauu

SEQ ID NO: 3290796 - RNA, 19 nt, Artificial Sequence
  Description of Artificial Sequence: Synthetic oligonucleotide
uaacguaugugagaaauuu

SEQ ID NO: 3290797 - RNA, 19 nt, Artificial Sequence
  Description of Artificial Sequence: Synthetic oligonucleotide
uuuugaaagugagcgggaa

SEQ ID NO: 3290798 - RNA, 19 nt, Artificial Sequence
  Description of Artificial Sequence: Synthetic oligonucleotide
ugaaagugagcgggaagau

SEQ ID NO: 3290799 - RNA, 19 nt, Artificial Sequence
  Description of Artificial Sequence: Synthetic oligonucleotide
gaagaugcagcagcgugau

SEQ ID NO: 3290800 - RNA, 19 nt, Artificial Sequence
  Description of Artificial Sequence: Synthetic oligonucleotide
ugauuggaagacagcugua

SEQ ID NO: 3290801 - RNA, 19 nt, Artificial Sequence
  Description of Artificial Sequence: Synthetic oligonucleotide
ccagugggcccguaauuuu

SEQ ID NO: 3290802 - RNA, 19 nt, Artificial Sequence
  Description of Artificial Sequence: Synthetic oligonucleotide
cguaauuuugcugagccua

SEQ ID NO: 3290803 - RNA, 19 nt, Artificial Sequence
  Description of Artificial Sequence: Synthetic oligonucleotide
cuagcgacaccuacuggaa

SEQ ID NO: 3290804 - RNA, 19 nt, Artificial Sequence
  Description of Artificial Sequence: Synthetic oligonucleotide
uacuggaagccuaguagaa

SEQ ID NO: 3290805 - RNA, 19 nt, Artificial Sequence
  Description of Artificial Sequence: Synthetic oligonucleotide
acuggaagccuaguagaaa

SEQ ID NO: 3290806 - RNA, 19 nt, Artificial Sequence
  Description of Artificial Sequence: Synthetic oligonucleotide
cuggaagccuaguagaaau

SEQ ID NO: 3290807 - RNA, 19 nt, Artificial Sequence
  Description of Artificial Sequence: Synthetic oligonucleotide
uagaaauaaguggugggau

SEQ ID NO: 3290808 - RNA, 19 nt, Artificial Sequence
  Description of Artificial Sequence: Synthetic oligonucleotide
aauaaguggugggauggau

SEQ ID NO: 3290809 - RNA, 19 nt, Artificial Sequence
  Description of Artificial Sequence: Synthetic oligonucleotide
auaaguggugggauggaua

SEQ ID NO: 3290810 - RNA, 19 nt, Artificial Sequence
  Description of Artificial Sequence: Synthetic oligonucleotide
uaaguggugggauggauau

SEQ ID NO: 3290811 - RNA, 19 nt, Artificial Sequence
  Description of Artificial Sequence: Synthetic oligonucleotide
guggugggauggauaucau

SEQ ID NO: 3290812 - RNA, 19 nt, Artificial Sequence
  Description of Artificial Sequence: Synthetic oligonucleotide
ggauggauaucauggagaa

SEQ ID NO: 3290813 - RNA, 19 nt, Artificial Sequence
  Description of Artificial Sequence: Synthetic oligonucleotide
uggauaucauggagaagaa

SEQ ID NO: 3290814 - RNA, 19 nt, Artificial Sequence
  Description of Artificial Sequence: Synthetic oligonucleotide
auaucauggagaagaaguu

SEQ ID NO: 3290815 - RNA, 19 nt, Artificial Sequence
  Description of Artificial Sequence: Synthetic oligonucleotide
ucauggagaagaaguuguu

SEQ ID NO: 3290816 - RNA, 19 nt, Artificial Sequence
  Description of Artificial Sequence: Synthetic oligonucleotide
uggagaagaaguuguuguu

SEQ ID NO: 3290817 - RNA, 19 nt, Artificial Sequence
  Description of Artificial Sequence: Synthetic oligonucleotide
ggagaagaaguuguuguuu

SEQ ID NO: 3290818 - RNA, 19 nt, Artificial Sequence
  Description of Artificial Sequence: Synthetic oligonucleotide
gagaagaaguuguuguuuu

SEQ ID NO: 3290819 - RNA, 19 nt, Artificial Sequence
  Description of Artificial Sequence: Synthetic oligonucleotide
agaaguuguuguuuuggau

SEQ ID NO: 3290820 - RNA, 19 nt, Artificial Sequence
  Description of Artificial Sequence: Synthetic oligonucleotide
aguuguuguuuuggaugau

SEQ ID NO: 3290821 - RNA, 19 nt, Artificial Sequence
  Description of Artificial Sequence: Synthetic oligonucleotide
guuguuguuuuggaugauu

SEQ ID NO: 3290822 - RNA, 19 nt, Artificial Sequence
  Description of Artificial Sequence: Synthetic oligonucleotide
uuuuauggcugguuaccuu

SEQ ID NO: 3290823 - RNA, 19 nt, Artificial Sequence
  Description of Artificial Sequence: Synthetic oligonucleotide
uggcugguuaccuugggau

SEQ ID NO: 3290824 - RNA, 19 nt, Artificial Sequence
  Description of Artificial Sequence: Synthetic oligonucleotide
cugguuaccuugggaugau

SEQ ID NO: 3290825 - RNA, 19 nt, Artificial Sequence
  Description of Artificial Sequence: Synthetic oligonucleotide
gagacugugugaccgguau

SEQ ID NO: 3290826 - RNA, 19 nt, Artificial Sequence
  Description of Artificial Sequence: Synthetic oligonucleotide
cugugugaccgguauccau

SEQ ID NO: 3290827 - RNA, 19 nt, Artificial Sequence
  Description of Artificial Sequence: Synthetic oligonucleotide
ugugugaccgguauccauu

SEQ ID NO: 3290828 - RNA, 19 nt, Artificial Sequence
  Description of Artificial Sequence: Synthetic oligonucleotide
ccgguauccauugacugua

SEQ ID NO: 3290829 - RNA, 19 nt, Artificial Sequence
  Description of Artificial Sequence: Synthetic oligonucleotide
ccauugacuguagagacua

SEQ ID NO: 3290830 - RNA, 19 nt, Artificial Sequence
  Description of Artificial Sequence: Synthetic oligonucleotide
guauuuugauuaccagcaa

SEQ ID NO: 3290831 - RNA, 19 nt, Artificial Sequence
  Description of Artificial Sequence: Synthetic oligonucleotide
uauuuugauuaccagcaau

SEQ ID NO: 3290832 - RNA, 19 nt, Artificial Sequence
  Description of Artificial Sequence: Synthetic oligonucleotide
caggaaugguacuccucaa

SEQ ID NO: 3290833 - RNA, 19 nt, Artificial Sequence
  Description of Artificial Sequence: Synthetic oligonucleotide
cagcuguagaagcucucua

SEQ ID NO: 3290834 - RNA, 19 nt, Artificial Sequence
  Description of Artificial Sequence: Synthetic oligonucleotide
agcuguagaagcucucuau

SEQ ID NO: 3290835 - RNA, 19 nt, Artificial Sequence
  Description of Artificial Sequence: Synthetic oligonucleotide
uaucggaggauuacuacuu

SEQ ID NO: 3290836 - RNA, 19 nt, Artificial Sequence
  Description of Artificial Sequence: Synthetic oligonucleotide
aucggaggauuacuacuuu

SEQ ID NO: 3290837 - RNA, 19 nt, Artificial Sequence
  Description of Artificial Sequence: Synthetic oligonucleotide
gaggauuacuacuuugcaa

SEQ ID NO: 3290838 - RNA, 19 nt, Artificial Sequence
  Description of Artificial Sequence: Synthetic oligonucleotide
aggauuacuacuuugcaau

SEQ ID NO: 3290839 - RNA, 19 nt, Artificial Sequence
  Description of Artificial Sequence: Synthetic oligonucleotide
cuacuuugcaauuuuggaa

SEQ ID NO: 3290840 - RNA, 19 nt, Artificial Sequence
  Description of Artificial Sequence: Synthetic oligonucleotide
uuggaagacugcuggagaa

SEQ ID NO: 3290841 - RNA, 19 nt, Artificial Sequence
  Description of Artificial Sequence: Synthetic oligonucleotide
aagacugcuggagaacaau

SEQ ID NO: 3290842 - RNA, 19 nt, Artificial Sequence
  Description of Artificial Sequence: Synthetic oligonucleotide
agaacaauccacggaggua

SEQ ID NO: 3290843 - RNA, 19 nt, Artificial Sequence
  Description of Artificial Sequence: Synthetic oligonucleotide
acccgaaggccgauuugaa

SEQ ID NO: 3290844 - RNA, 19 nt, Artificial Sequence
  Description of Artificial Sequence: Synthetic oligonucleotide
ugcccuuuucccauauaaa

SEQ ID NO: 3290845 - RNA, 19 nt, Artificial Sequence
  Description of Artificial Sequence: Synthetic oligonucleotide
aacacccaccucuuauggg

SEQ ID NO: 3290846 - RNA, 19 nt, Artificial Sequence
  Description of Artificial Sequence: Synthetic oligonucleotide
uaagggugaacacccaccu

SEQ ID NO: 3290847 - RNA, 19 nt, Artificial Sequence
  Description of Artificial Sequence: Synthetic oligonucleotide
uuaagggugaacacccacc

SEQ ID NO: 3290848 - RNA, 19 nt, Artificial Sequence
  Description of Artificial Sequence: Synthetic oligonucleotide
auuaagggugaacacccac

SEQ ID NO: 3290849 - RNA, 19 nt, Artificial Sequence
  Description of Artificial Sequence: Synthetic oligonucleotide
uauuaagggugaacaccca

SEQ ID NO: 3290850 - RNA, 19 nt, Artificial Sequence
  Description of Artificial Sequence: Synthetic oligonucleotide
uuauuaagggugaacaccc

SEQ ID NO: 3290851 - RNA, 19 nt, Artificial Sequence
  Description of Artificial Sequence: Synthetic oligonucleotide
aagcucccguauuuuguuu

SEQ ID NO: 3290852 - RNA, 19 nt, Artificial Sequence
  Description of Artificial Sequence: Synthetic oligonucleotide
aagggagauuggaagcucc

SEQ ID NO: 3290853 - RNA, 19 nt, Artificial Sequence
  Description of Artificial Sequence: Synthetic oligonucleotide
uuccucuccgcaaacaaaa

SEQ ID NO: 3290854 - RNA, 19 nt, Artificial Sequence
  Description of Artificial Sequence: Synthetic oligonucleotide
aaaccuuccucuccgcaaa

SEQ ID NO: 3290855 - RNA, 19 nt, Artificial Sequence
  Description of Artificial Sequence: Synthetic oligonucleotide
uuccaaaccuuccucuccg

SEQ ID NO: 3290856 - RNA, 19 nt, Artificial Sequence
  Description of Artificial Sequence: Synthetic oligonucleotide
uacccucuuccaaaccuuc

SEQ ID NO: 3290857 - RNA, 19 nt, Artificial Sequence
  Description of Artificial Sequence: Synthetic oligonucleotide
uucuacccucuuccaaacc

SEQ ID NO: 3290858 - RNA, 19 nt, Artificial Sequence
  Description of Artificial Sequence: Synthetic oligonucleotide
aauucgcaaaccccuggag

SEQ ID NO: 3290859 - RNA, 19 nt, Artificial Sequence
  Description of Artificial Sequence: Synthetic oligonucleotide
aaauucgcaaaccccugga

SEQ ID NO: 3290860 - RNA, 19 nt, Artificial Sequence
  Description of Artificial Sequence: Synthetic oligonucleotide
uagcaaaauucgcaaaccc

SEQ ID NO: 3290861 - RNA, 19 nt, Artificial Sequence
  Description of Artificial Sequence: Synthetic oligonucleotide
uucuuagcaaaauucgcaa

SEQ ID NO: 3290862 - RNA, 19 nt, Artificial Sequence
  Description of Artificial Sequence: Synthetic oligonucleotide
aagucugcuucuuagcaaa

SEQ ID NO: 3290863 - RNA, 19 nt, Artificial Sequence
  Description of Artificial Sequence: Synthetic oligonucleotide
aaagucugcuucuuagcaa

SEQ ID NO: 3290864 - RNA, 19 nt, Artificial Sequence
  Description of Artificial Sequence: Synthetic oligonucleotide
aaaagucugcuucuuagca

SEQ ID NO: 3290865 - RNA, 19 nt, Artificial Sequence
  Description of Artificial Sequence: Synthetic oligonucleotide
uaaaagucugcuucuuagc

SEQ ID NO: 3290866 - RNA, 19 nt, Artificial Sequence
  Description of Artificial Sequence: Synthetic oligonucleotide
uuaaaagucugcuucuuag

SEQ ID NO: 3290867 - RNA, 19 nt, Artificial Sequence
  Description of Artificial Sequence: Synthetic oligonucleotide
uucaccuuguuaaaagucu

SEQ ID NO: 3290868 - RNA, 19 nt, Artificial Sequence
  Description of Artificial Sequence: Synthetic oligonucleotide
uaccacuucaccuuguuaa

SEQ ID NO: 3290869 - RNA, 19 nt, Artificial Sequence
  Description of Artificial Sequence: Synthetic oligonucleotide
auaccacuucaccuuguua

SEQ ID NO: 3290870 - RNA, 19 nt, Artificial Sequence
  Description of Artificial Sequence: Synthetic oligonucleotide
aauaccacuucaccuuguu

SEQ ID NO: 3290871 - RNA, 19 nt, Artificial Sequence
  Description of Artificial Sequence: Synthetic oligonucleotide
aaauaccacuucaccuugu

SEQ ID NO: 3290872 - RNA, 19 nt, Artificial Sequence
  Description of Artificial Sequence: Synthetic oligonucleotide
uucgcuuucucgauguggc

SEQ ID NO: 3290873 - RNA, 19 nt, Artificial Sequence
  Description of Artificial Sequence: Synthetic oligonucleotide
uuccuuucgcuuucucgau

SEQ ID NO: 3290874 - RNA, 19 nt, Artificial Sequence
  Description of Artificial Sequence: Synthetic oligonucleotide
uuauucugcuggucgguuc

SEQ ID NO: 3290875 - RNA, 19 nt, Artificial Sequence
  Description of Artificial Sequence: Synthetic oligonucleotide
uucuuuauucugcuggucg

SEQ ID NO: 3290876 - RNA, 19 nt, Artificial Sequence
  Description of Artificial Sequence: Synthetic oligonucleotide
uacugcaguauucuuuauu

SEQ ID NO: 3290877 - RNA, 19 nt, Artificial Sequence
  Description of Artificial Sequence: Synthetic oligonucleotide
uuacugcaguauucuuuau

SEQ ID NO: 3290878 - RNA, 19 nt, Artificial Sequence
  Description of Artificial Sequence: Synthetic oligonucleotide
uuuacugcaguauucuuua

SEQ ID NO: 3290879 - RNA, 19 nt, Artificial Sequence
  Description of Artificial Sequence: Synthetic oligonucleotide
auguggccuucuuuacugc

SEQ ID NO: 3290880 - RNA, 19 nt, Artificial Sequence
  Description of Artificial Sequence: Synthetic oligonucleotide
uauguggccuucuuuacug

SEQ ID NO: 3290881 - RNA, 19 nt, Artificial Sequence
  Description of Artificial Sequence: Synthetic oligonucleotide
aaguauguggccuucuuua

SEQ ID NO: 3290882 - RNA, 19 nt, Artificial Sequence
  Description of Artificial Sequence: Synthetic oligonucleotide
uaaguauguggccuucuuu

SEQ ID NO: 3290883 - RNA, 19 nt, Artificial Sequence
  Description of Artificial Sequence: Synthetic oligonucleotide
auaaguauguggccuucuu

SEQ ID NO: 3290884 - RNA, 19 nt, Artificial Sequence
  Description of Artificial Sequence: Synthetic oligonucleotide
uacucacagcaguagacag

SEQ ID NO: 3290885 - RNA, 19 nt, Artificial Sequence
  Description of Artificial Sequence: Synthetic oligonucleotide
aaaggguacucacagcagu

SEQ ID NO: 3290886 - RNA, 19 nt, Artificial Sequence
  Description of Artificial Sequence: Synthetic oligonucleotide
aaaaggguacucacagcag

SEQ ID NO: 3290887 - RNA, 19 nt, Artificial Sequence
  Description of Artificial Sequence: Synthetic oligonucleotide
aacugcucggcuacaguca

SEQ ID NO: 3290888 - RNA, 19 nt, Artificial Sequence
  Description of Artificial Sequence: Synthetic oligonucleotide
uacguuacagggaacugcu

SEQ ID NO: 3290889 - RNA, 19 nt, Artificial Sequence
  Description of Artificial Sequence: Synthetic oligonucleotide
uucucacauacguuacagg

SEQ ID NO: 3290890 - RNA, 19 nt, Artificial Sequence
  Description of Artificial Sequence: Synthetic oligonucleotide
aauuucucacauacguuac

SEQ ID NO: 3290891 - RNA, 19 nt, Artificial Sequence
  Description of Artificial Sequence: Synthetic oligonucleotide
aaauuucucacauacguua

SEQ ID NO: 3290892 - RNA, 19 nt, Artificial Sequence
  Description of Artificial Sequence: Synthetic oligonucleotide
uucccgcucacuuucaaaa

SEQ ID NO: 3290893 - RNA, 19 nt, Artificial Sequence
  Description of Artificial Sequence: Synthetic oligonucleotide
aucuucccgcucacuuuca

SEQ ID NO: 3290894 - RNA, 19 nt, Artificial Sequence
  Description of Artificial Sequence: Synthetic oligonucleotide
aucacgcugcugcaucuuc

SEQ ID NO: 3290895 - RNA, 19 nt, Artificial Sequence
  Description of Artificial Sequence: Synthetic oligonucleotide
uacagcugucuuccaauca

SEQ ID NO: 3290896 - RNA, 19 nt, Artificial Sequence
  Description of Artificial Sequence: Synthetic oligonucleotide
aaaauuacgggcccacugg

SEQ ID NO: 3290897 - RNA, 19 nt, Artificial Sequence
  Description of Artificial Sequence: Synthetic oligonucleotide
uaggcucagcaaaauuacg

SEQ ID NO: 3290898 - RNA, 19 nt, Artificial Sequence
  Description of Artificial Sequence: Synthetic oligonucleotide
uuccaguaggugucgcuag

SEQ ID NO: 3290899 - RNA, 19 nt, Artificial Sequence
  Description of Artificial Sequence: Synthetic oligonucleotide
uucuacuaggcuuccagua

SEQ ID NO: 3290900 - RNA, 19 nt, Artificial Sequence
  Description of Artificial Sequence: Synthetic oligonucleotide
uuucuacuaggcuuccagu

SEQ ID NO: 3290901 - RNA, 19 nt, Artificial Sequence
  Description of Artificial Sequence: Synthetic oligonucleotide
auuucuacuaggcuuccag

SEQ ID NO: 3290902 - RNA, 19 nt, Artificial Sequence
  Description of Artificial Sequence: Synthetic oligonucleotide
aucccaccacuuauuucua

SEQ ID NO: 3290903 - RNA, 19 nt, Artificial Sequence
  Description of Artificial Sequence: Synthetic oligonucleotide
auccaucccaccacuuauu

SEQ ID NO: 3290904 - RNA, 19 nt, Artificial Sequence
  Description of Artificial Sequence: Synthetic oligonucleotide
uauccaucccaccacuuau

SEQ ID NO: 3290905 - RNA, 19 nt, Artificial Sequence
  Description of Artificial Sequence: Synthetic oligonucleotide
auauccaucccaccacuua

SEQ ID NO: 3290906 - RNA, 19 nt, Artificial Sequence
  Description of Artificial Sequence: Synthetic oligonucleotide
augauauccaucccaccac

SEQ ID NO: 3290907 - RNA, 19 nt, Artificial Sequence
  Description of Artificial Sequence: Synthetic oligonucleotide
uucuccaugauauccaucc

SEQ ID NO: 3290908 - RNA, 19 nt, Artificial Sequence
  Description of Artificial Sequence: Synthetic oligonucleotide
uucuucuccaugauaucca

SEQ ID NO: 3290909 - RNA, 19 nt, Artificial Sequence
  Description of Artificial Sequence: Synthetic oligonucleotide
aacuucuucuccaugauau

SEQ ID NO: 3290910 - RNA, 19 nt, Artificial Sequence
  Description of Artificial Sequence: Synthetic oligonucleotide
aacaacuucuucuccauga

SEQ ID NO: 3290911 - RNA, 19 nt, Artificial Sequence
  Description of Artificial Sequence: Synthetic oligonucleotide
aacaacaacuucuucucca

SEQ ID NO: 3290912 - RNA, 19 nt, Artificial Sequence
  Description of Artificial Sequence: Synthetic oligonucleotide
aaacaacaacuucuucucc

SEQ ID NO: 3290913 - RNA, 19 nt, Artificial Sequence
  Description of Artificial Sequence: Synthetic oligonucleotide
aaaacaacaacuucuucuc

SEQ ID NO: 3290914 - RNA, 19 nt, Artificial Sequence
  Description of Artificial Sequence: Synthetic oligonucleotide
auccaaaacaacaacuucu

SEQ ID NO: 3290915 - RNA, 19 nt, Artificial Sequence
  Description of Artificial Sequence: Synthetic oligonucleotide
aucauccaaaacaacaacu

SEQ ID NO: 3290916 - RNA, 19 nt, Artificial Sequence
  Description of Artificial Sequence: Synthetic oligonucleotide
aaucauccaaaacaacaac

SEQ ID NO: 3290917 - RNA, 19 nt, Artificial Sequence
  Description of Artificial Sequence: Synthetic oligonucleotide
aagguaaccagccauaaaa

SEQ ID NO: 3290918 - RNA, 19 nt, Artificial Sequence
  Description of Artificial Sequence: Synthetic oligonucleotide
aucccaagguaaccagcca

SEQ ID NO: 3290919 - RNA, 19 nt, Artificial Sequence
  Description of Artificial Sequence: Synthetic oligonucleotide
aucaucccaagguaaccag

SEQ ID NO: 3290920 - RNA, 19 nt, Artificial Sequence
  Description of Artificial Sequence: Synthetic oligonucleotide
auaccggucacacagucuc

SEQ ID NO: 3290921 - RNA, 19 nt, Artificial Sequence
  Description of Artificial Sequence: Synthetic oligonucleotide
auggauaccggucacacag

SEQ ID NO: 3290922 - RNA, 19 nt, Artificial Sequence
  Description of Artificial Sequence: Synthetic oligonucleotide
aauggauaccggucacaca

SEQ ID NO: 3290923 - RNA, 19 nt, Artificial Sequence
  Description of Artificial Sequence: Synthetic oligonucleotide
uacagucaauggauaccgg

SEQ ID NO: 3290924 - RNA, 19 nt, Artificial Sequence
  Description of Artificial Sequence: Synthetic oligonucleotide
uagucucuacagucaaugg

SEQ ID NO: 3290925 - RNA, 19 nt, Artificial Sequence
  Description of Artificial Sequence: Synthetic oligonucleotide
uugcugguaaucaaaauac

SEQ ID NO: 3290926 - RNA, 19 nt, Artificial Sequence
  Description of Artificial Sequence: Synthetic oligonucleotide
auugcugguaaucaaaaua

SEQ ID NO: 3290927 - RNA, 19 nt, Artificial Sequence
  Description of Artificial Sequence: Synthetic oligonucleotide
uugaggaguaccauuccug

SEQ ID NO: 3290928 - RNA, 19 nt, Artificial Sequence
  Description of Artificial Sequence: Synthetic oligonucleotide
uagagagcuucuacagcug

SEQ ID NO: 3290929 - RNA, 19 nt, Artificial Sequence
  Description of Artificial Sequence: Synthetic oligonucleotide
auagagagcuucuacagcu

SEQ ID NO: 3290930 - RNA, 19 nt, Artificial Sequence
  Description of Artificial Sequence: Synthetic oligonucleotide
aaguaguaauccuccgaua

SEQ ID NO: 3290931 - RNA, 19 nt, Artificial Sequence
  Description of Artificial Sequence: Synthetic oligonucleotide
aaaguaguaauccuccgau

SEQ ID NO: 3290932 - RNA, 19 nt, Artificial Sequence
  Description of Artificial Sequence: Synthetic oligonucleotide
uugcaaaguaguaauccuc

SEQ ID NO: 3290933 - RNA, 19 nt, Artificial Sequence
  Description of Artificial Sequence: Synthetic oligonucleotide
auugcaaaguaguaauccu

SEQ ID NO: 3290934 - RNA, 19 nt, Artificial Sequence
  Description of Artificial Sequence: Synthetic oligonucleotide
uuccaaaauugcaaaguag

SEQ ID NO: 3290935 - RNA, 19 nt, Artificial Sequence
  Description of Artificial Sequence: Synthetic oligonucleotide
uucuccagcagucuuccaa

SEQ ID NO: 3290936 - RNA, 19 nt, Artificial Sequence
  Description of Artificial Sequence: Synthetic oligonucleotide
auuguucuccagcagucuu

SEQ ID NO: 3290937 - RNA, 19 nt, Artificial Sequence
  Description of Artificial Sequence: Synthetic oligonucleotide
uaccuccguggauuguucu

SEQ ID NO: 3290938 - RNA, 19 nt, Artificial Sequence
  Description of Artificial Sequence: Synthetic oligonucleotide
uucaaaucggccuucgggu

SEQ ID NO: 3290939 - RNA, 19 nt, Artificial Sequence
  Description of Artificial Sequence: Synthetic oligonucleotide
uuuauaugggaaaagggca
